United States Patent Application Publication US 2026/0327580 A1 - sequence listing, part 5

SEQ ID NO: 6069 - DNA, 2523 bp, synthetic construct
  misc_feature 1..2523: note = Variant of DNA polymerase I from Thermus sp. strain 2.9
  source 1..2523: mol_type = other DNA
atgcaccatcatcatcatcatggcggtagcggcgtgttaccggtgttcgagcctaaaggtcgcgtgcttctggttgatggccatcatctcgcgtatcgtaacttctttgccctgaaaggattaaccaccagcctgggcgagccggtacagggtgtctacggctttgcaaagtcgctcctgaaagctctgaaagaagacggtgatgtggtgattgttgtctttgatgcgaaagcgccaagttttcgccacgaagcgtacgaagcttacaaagccgggcgtgctccaacgccggaagactttcctcgccaattggcgcttatgaaggaattagtggatttgcttggcctcgaacgcttggaagttcccggtttcgaggcagacgacgtattagcgactctcgcaaagaaagccgaacgtgagggctatgaagtccagatcttgacagcagatcgcgatcttttccagcttttatctccgcgcatctcggtgttacacccggaagggcatcgtatcaccccggaatggctctgggagaaatatggtttgcgtcccgaacaatgggtggattttcgcgccttagcaggcgatccgagcgacaatattccgggagttaaaggtatcggcgagaagacggcgctcaagctccttaaagaatgggggtcgttggagaacttgcttaagaatttagatcaggtcaaaccagagtcagtgcgtgagaagattcttgctcacctcgaagacctcaaattaagccgcgaattgtcccgtgtacgcaccgatttgccgctcgaagttgatttcggtcgccgccgcgaacctgactgggagggtcttaaagcgtttttagagcgtcttgaatttggttcgctcttgcatgaattcggccttttagaaagcccgttactggccgaagaagcaccttggccaccgcccgagggcgcgtttttaggttaccgtttgagtcgcccggaaccgatgtgggccgaattactggctcttgcagcgtctgcccagggacgtgtgtatcgcgcggaagaccctcatggtgcgctccgcggcctcttcgaagtccgtggactccttgccaaagacttagctgttgttgcattgcgcgaaggtcttgatttacctccgactgatgatccaatgcttcttgcgtacctcttggacccgtcaaacacgacgcccgaaggcgtagcccgtcgttacggcggcgagtggaccgaagatgcagcgaaacgcgcgttattggccgaacgtttgcacgaaaatttattaggacgtttgcaaggcgaggaacgtctcctctggctttacgaagaagtggagaaaccattgagtcgcgtgctcgcgcatatggaagctaccggtgtcaaattagacgtggcgtatttggagaatctcagccttgaagttgctgcccacatgcgccgcttggaggaagaagtattccgtttagcaggccgttcctttcgccttaactctcgcgatcagttagaacgtgtgttgttcgatgaacttggtctccctcctatcggcaagacagagaagaccggtaaacgtagcacttcagcggcggttttagaagctcttcgcgaagtccatcccattgtggacaagatcttgcagtaccgcgaaatggcgaaattgaaaggcacctatattgaccgtcttccggcattagtccacccgaaaacgggacgcctccatacccgcttcaaccaaacagccacggcgaccggtcgtttgtcctcctctgatccaaaccttcagaatattccagtacgtaccccattgggccagaagatccgccgtgcgtttgtagctgaggagggttggcgtttagtggccctcgattatcgtcaaattgaattacgtgtccttgcccatctttctggcgatgagaacctcatccgcgtgtttcaggaaggcaaagacattcacactcaaacggttagctggatgtttggattatcagctgaagcgatcgatcctttgatgcgtcgtgcagcgaagaccatcaatttcggtgttctctacggtatgagtgcctttcgtttgtcgcaggaattaggcattccctatgaagaagctcaggcgttcattcagaaatactttcaaagctatcccaaagttaaagcatggatcgagaagactctccgtgaaggccgcacacgtggttacgtagagaccttatttggacgtcgccgctatgttcccgatttaaacgctcgcgtgaaaggcaagcgtgaagccgccgaacgcatggcgttcaacatgcctgtacagggcacggcagctgacctcatgaaacttgcaatggtgcgcctttttccacaattgcgtgaagttggtgcccgcatgctcttgcaggtccacgatgaactcttgttagaagcgccaaaagagcgtgcggaagaggtggcagccctcgcgaaagaagttatggaaggcgtgtggcccttagcggtgcctcttgaagtcgaagttggtattggcgaggattggctggctgccaaagga

SEQ ID NO: 6070 - protein, 841 aa, synthetic construct
  REGION 1..841: note = Variant of DNA polymerase I from Thermus sp. strain 2.9
MHHHHHHGGSGVLPVFEPKGRVLLVDGHHLAYRNFFALKGLTTSLGEPVQGVYGFAKSLLKALKEDGDVVIVVFDAKAPSFRHEAYEAYKAGRAPTPEDFPRQLALMKELVDLLGLERLEVPGFEADDVLATLAKKAEREGYEVQILTADRDLFQLLSPRISVLHPEGHRITPEWLWEKYGLRPEQWVDFRALAGDPSDNIPGVKGIGEKTALKLLKEWGSLENLLKNLDQVKPESVREKILAHLEDLKLSRELSRVRTDLPLEVDFGRRREPDWEGLKAFLERLEFGSLLHEFGLLESPLLAEEAPWPPPEGAFLGYRLSRPEPMWAELLALAASAQGRVYRAEDPHGALRGLFEVRGLLAKDLAVVALREGLDLPPTDDPMLLAYLLDPSNTTPEGVARRYGGEWTEDAAKRALLAERLHENLLGRLQGEERLLWLYEEVEKPLSRVLAHMEATGVKLDVAYLENLSLEVAAHMRRLEEEVFRLAGRSFRLNSRDQLERVLFDELGLPPIGKTEKTGKRSTSAAVLEALREVHPIVDKILQYREMAKLKGTYIDRLPALVHPKTGRLHTRFNQTATATGRLSSSDPNLQNIPVRTPLGQKIRRAFVAEEGWRLVALDYRQIELRVLAHLSGDENLIRVFQEGKDIHTQTVSWMFGLSAEAIDPLMRRAAKTINFGVLYGMSAFRLSQELGIPYEEAQAFIQKYFQSYPKVKAWIEKTLREGRTRGYVETLFGRRRYVPDLNARVKGKREAAERMAFNMPVQGTAADLMKLAMVRLFPQLREVGARMLLQVHDELLLEAPKERAEEVAALAKEVMEGVWPLAVPLEVEVGIGEDWLAAKG

SEQ ID NO: 6071 - DNA, 2523 bp, synthetic construct
  misc_feature 1..2523: note = Variant of DNA polymerase I from Thermus sp. strain 2.9
  source 1..2523: mol_type = other DNA
atgcaccatcatcatcatcatggcggtagcggcgtgttaccggtgttcgagcctaaaggtcgcgtgcttctggttgatggccatcatctcgcgtatcgtaacttctttgccctgaaaggattaaccaccagcctgggcgagccggtacagggtgtctacggctttgcaaagtcgctcctgaaagctctgaaagaagacggtgatgtggtgattgttgtctttgatgcgaaagcgccaagttttcgccacgaagcgtacgaagcttacaaagccgggcgtgctccaacgccggaagactttcctcgccaattggcgcttatgaaggaattagtggatttgcttggcctcgaacgcttggaagttcccggtttcgaggcagacgacgtattagcgactctcgcaaagaaagccgaacgtgagggctatgaagtccagatcttgacagcagatcgcgatcttttccagcttttatctccgcgcatctcggtgttacacccggaagggcatcgtatcaccccggaatggctctgggagaaatatggtttgcgtcccgaacaatgggtggattttcgcgccttagcaggcgatccgagcgacaatattccgggagttaaaggtatcggcgagaagacggcgctcaagctccttaaagaatgggggtcgttggagaacttgcttaagaatttagatcaggtcaaaccagagtcagtgcgtgagaagattcttgctcacctcgaagacctcaaattaagccgcgaattgtcccgtgtacgcaccgatttgccgctcgaagttgatttcggtcgccgccgcgaacctgactgggagggtcttaaagcgtttttagagcgtcttgaatttggttcgctcttgcatgaattcggccttttagaaagcccgttactggccgaagaagcaccttggccaccgcccgagggcgcgtttttaggttaccgtttgagtcgcccggaaccgatgtgggccgaattactggctcttgcagcgtctgcccagggacgtgtgtatcgcgcggaagaccctcatggtgcgctccgcggcctcttcgaagtccgtggactccttgccaaagacttagctgttgttgcattgcgcgaaggtcttgatttacctccgactgatgatccaatgcttcttgcgtacctcttggacccgtcaaacacgacgcccgaaggcgtagcccgtcgttacggcggcgagtggaccgaagatgcagcgaaacgcgcgttattggccgaacgtttgcacgaaaatttattaggacgtttgcaaggcgaggaacgtctcctctggctttacgaagaagtggagaaaccattgagtcgcgtgctcgcgcatatggaagctaccggtgtcaaattagacgtggcgtatttggagaatctcagccttgaagttgctgcccacatgcgccgcttggaggaagaagtattccgtttagcaggccgttcctttcgccttaactctcgcgatcagttagaacgtgtgttgttcgatgaacttggtctccctcctatcggcacgacagagaagaccggtaaacgtagcacttcagcggcggttttagaagctcttcgcgaagtccatcccattgtggacaagatcttgcagtaccgcgaaatggcgaaattgaaaggcacctatattgaccgtcttccggcattagtccacccgaaaacgggacgcctccatacccgcttcaaccaaacagccacggcgaccggtcgtttgtcctcctctgatccaaaccttcagaatattccagtacgtaccccattgggccagaagatccgccgtgcgtttgtagctgaggagggttggcgtttagtggccctcgattatcgtcaaattgaattacgtgtccttgcccatctttctggcgatgagaacctcatccgcgtgtttcaggaaggcaaagacattcacactcaaacggcaagctggatgtttggattatcagctgaagcgatcgatcctttgatgcgtcgtgcagcgaagaccatcaatttcggtgttctctacggtatgagtgcctttcgtttgtcgcaggaattaggcattccctatgaagaagctcaggcgttcattcagaaatactttcaaagctatcccaaagttaaagcatggatcgagaagactctccgtgaaggccgcacacgtggttacgtagagaccttatttggacgtcgccgctatgttcccgatttaaacgctcgcgtgaaaggcaagcgtgaagccgccgaacgcatggcgttcaacatgcctgtacagggcacggcagctgacctcatgaaacttgcaatggtgcgcctttttccacaattgcgtgaagttggtgcccgcatgctcttgcaggtccacgatgaactcttgttagaagcgccaaaagagcgtgcggaagaggtggcagccctcgcgaaagaagttatggaaggcgtgtggcccttagcggtgcctcttgaagtcgaagttggtattggcgaggattggctggctgccaaagga

SEQ ID NO: 6072 - protein, 841 aa, synthetic construct
  REGION 1..841: note = Variant of DNA polymerase I from Thermus sp. strain 2.9
MHHHHHHGGSGVLPVFEPKGRVLLVDGHHLAYRNFFALKGLTTSLGEPVQGVYGFAKSLLKALKEDGDVVIVVFDAKAPSFRHEAYEAYKAGRAPTPEDFPRQLALMKELVDLLGLERLEVPGFEADDVLATLAKKAEREGYEVQILTADRDLFQLLSPRISVLHPEGHRITPEWLWEKYGLRPEQWVDFRALAGDPSDNIPGVKGIGEKTALKLLKEWGSLENLLKNLDQVKPESVREKILAHLEDLKLSRELSRVRTDLPLEVDFGRRREPDWEGLKAFLERLEFGSLLHEFGLLESPLLAEEAPWPPPEGAFLGYRLSRPEPMWAELLALAASAQGRVYRAEDPHGALRGLFEVRGLLAKDLAVVALREGLDLPPTDDPMLLAYLLDPSNTTPEGVARRYGGEWTEDAAKRALLAERLHENLLGRLQGEERLLWLYEEVEKPLSRVLAHMEATGVKLDVAYLENLSLEVAAHMRRLEEEVFRLAGRSFRLNSRDQLERVLFDELGLPPIGTTEKTGKRSTSAAVLEALREVHPIVDKILQYREMAKLKGTYIDRLPALVHPKTGRLHTRFNQTATATGRLSSSDPNLQNIPVRTPLGQKIRRAFVAEEGWRLVALDYRQIELRVLAHLSGDENLIRVFQEGKDIHTQTASWMFGLSAEAIDPLMRRAAKTINFGVLYGMSAFRLSQELGIPYEEAQAFIQKYFQSYPKVKAWIEKTLREGRTRGYVETLFGRRRYVPDLNARVKGKREAAERMAFNMPVQGTAADLMKLAMVRLFPQLREVGARMLLQVHDELLLEAPKERAEEVAALAKEVMEGVWPLAVPLEVEVGIGEDWLAAKG

SEQ ID NO: 6073 - DNA, 2523 bp, synthetic construct
  misc_feature 1..2523: note = Variant of DNA polymerase I from Thermus sp. strain 2.9
  source 1..2523: mol_type = other DNA
atgcaccatcatcatcatcatggcggtagcggcgtgttaccggtgttcgagcctaaaggtcgcgtgcttctggttgatggccatcatctcgcgtatcgtaacttctttgccctgaaaggattaaccaccagcctgggcgagccggtacagggtgtctacggctttgcaaagtcgctcctgaaagctctgaaagaagacggtgatgtggtgattgttgtctttgatgcgaaagcgccaagttttcgccacgaagcgtacgaagcttacaaagccgggcgtgctccaacgccggaagactttcctcgccaattggcgcttatgaaggaattagtggatttgcttggcctcgaacgcttggaagttcccggtttcgaggcagacgacgtattagcgactctcgcaaagaaagccgaacgtgagggctatgaagtccagatcttgacagcagatcgcgatcttttccagcttttatctccgcgcatctcggtgttacacccggaagggcatcgtatcaccccggaatggctctgggagaaatatggtttgcgtcccgaacaatgggtggattttcgcgccttagcaggcgatccgagcgacaatattccgggagttaaaggtatcggcgagaagacggcgctcaagctccttaaagaatgggggtcgttggagaacttgcttaagaatttagatcaggtcaaaccagagtcagtgcgtgagaagattcttgctcacctcgaagacctcaaattaagccgcgaattgtcccgtgtacgcaccgatttgccgctcgaagttgatttcggtcgccgccgcgaacctgactgggagggtcttaaagcgtttttagagcgtcttgaatttggttcgctcttgcatgaattcggccttttagaaagcccgttactggccgaagaagcaccttggccaccgcccgagggcgcgtttttaggttaccgtttgagtcgcccggaaccgatgtgggccgaattactgattcttgcagcgtctgcccagggacgtgtgtatcgcgcggaagaccctcatggtgcgctccgcggcctcttcgaagtccgtggactccttgccaaagacttagctgttgttgcattgcgcgaaggtcttgatttacctccgactgatgatccaatgcttcttgcgtacctcttggacccgtcaaacacgacgcccgaaggcgtagcccgtcgttacggcggcgagtggaccgaagatgcagcgaaacgcgcgttattggccgaacgtttgcacgaaaatttattaggacgtttgcaaggcgaggaacgtctcctctggctttacgaagaagtggagaaaccattgagtcgcgtgctcgcgcatatggaagctaccggtgtcaaattagacgtggcgtatttggagaatctcagccttgaagttgctgcccacatgcgccgcttggaggaagaagtattccgtttagcaggccgttcctttcgccttaactctcgcgatcagttagaacgtgtgttgttcgatgaacttggtctccctcctatcggcaagacagagaagaccggtaaacgtagcacttcagcggcggttttagaagctcttcgcgaagtccatcccattgtggacaagatcttgcagtaccgcgaaatggcgaaattgaaaggcacctatattgaccgtcttccggcattagtccacccgaaaacgggacgcctccatacccgcttcaaccaaacagccacggcgaccggtcgtttgtcctcctctgatccaaaccttcagaatattccagtacgtaccccattgggccagaagatccgccgtgcgtttgtagctgaggagggttggcgtttagtggccctcgattatcgtcaaattgaattacgtgtccttgcccatctttctggcgatgagaacctcatccgcgtgtttcaggaaggcaaagacattcacactcaaacggcaagctggatgtttggattatcagctgaagcgatcgatcctttgatgcgtcgtgcagcgaagaccatcaatttcggtgttctctacggtatgagtgcctttcgtttgtcgcaggaattaggcattccctatgaagaagctcaggcgttcattcagaaatactttcaaagctatcccaaagttaaagcatggatcgagaagactctccgtgaaggccgcacacgtggttacgtagagaccttatttggacgtcgccgctatgttcccgatttaaacgctcgcgtgaaaggcaagcgtgaagccgccgaacgcatggcgttcaacatgcctgtacagggcacggcagctgacctcatgaaacttgcaatggtgcgcctttttccacaattgcgtgaagttggtgcccgcatgctcttgcaggtccacgatgaactcttgttagaagcgccaaaagagcgtgcggaagaggtggcagccctcgcgaaagaagttatggaaggcgtgtggcccttagcggtgcctcttgaagtcgaagttggtattggcgaggattggctggctgccaaagga

SEQ ID NO: 6074 - protein, 841 aa, synthetic construct
  REGION 1..841: note = Variant of DNA polymerase I from Thermus sp. strain 2.9
MHHHHHHGGSGVLPVFEPKGRVLLVDGHHLAYRNFFALKGLTTSLGEPVQGVYGFAKSLLKALKEDGDVVIVVFDAKAPSFRHEAYEAYKAGRAPTPEDFPRQLALMKELVDLLGLERLEVPGFEADDVLATLAKKAEREGYEVQILTADRDLFQLLSPRISVLHPEGHRITPEWLWEKYGLRPEQWVDFRALAGDPSDNIPGVKGIGEKTALKLLKEWGSLENLLKNLDQVKPESVREKILAHLEDLKLSRELSRVRTDLPLEVDFGRRREPDWEGLKAFLERLEFGSLLHEFGLLESPLLAEEAPWPPPEGAFLGYRLSRPEPMWAELLILAASAQGRVYRAEDPHGALRGLFEVRGLLAKDLAVVALREGLDLPPTDDPMLLAYLLDPSNTTPEGVARRYGGEWTEDAAKRALLAERLHENLLGRLQGEERLLWLYEEVEKPLSRVLAHMEATGVKLDVAYLENLSLEVAAHMRRLEEEVFRLAGRSFRLNSRDQLERVLFDELGLPPIGKTEKTGKRSTSAAVLEALREVHPIVDKILQYREMAKLKGTYIDRLPALVHPKTGRLHTRFNQTATATGRLSSSDPNLQNIPVRTPLGQKIRRAFVAEEGWRLVALDYRQIELRVLAHLSGDENLIRVFQEGKDIHTQTASWMFGLSAEAIDPLMRRAAKTINFGVLYGMSAFRLSQELGIPYEEAQAFIQKYFQSYPKVKAWIEKTLREGRTRGYVETLFGRRRYVPDLNARVKGKREAAERMAFNMPVQGTAADLMKLAMVRLFPQLREVGARMLLQVHDELLLEAPKERAEEVAALAKEVMEGVWPLAVPLEVEVGIGEDWLAAKG

SEQ ID NO: 6075 - DNA, 2523 bp, synthetic construct
  misc_feature 1..2523: note = Variant of DNA polymerase I from Thermus sp. strain 2.9
  source 1..2523: mol_type = other DNA
atgcaccatcatcatcatcatggcggtagcggcgtgttaccggtgttcgagcctaaaggtcgcgtgcttctggttgatggccatcatctcgcgtatcgtaacttctttgccctgaaaggattaaccaccagcctgggcgagccggtacagggtgtctacggctttgcaaagtcgctcctgaaagctctgaaagaagacggtgatgtggtgattgttgtctttgatgcgaaagcgccaagttttcgccacgaagcgtacgaagcttacaaagccgggcgtgctccaacgccggaagactttcctcgccaattggcgcttatgaaggaattagtggatttgcttggcctcgaacgcttggaagttcccggtttcgaggcagacgacgtattagcgactctcgcaaagaaagccgaacgtgagggctatgaagtccagatcttgacagcagatcgcgatcttttccagcttttatctccgcgcatctcggtgttacacccggaagggcatcgtatcaccccggaatggctctgggagaaatatggtttgcgtcccgaacaatgggtggattttcgcgccttagcaggcgatccgagcgacaatattccgggagttaaaggtatcggcgagaagacggcgctcaagctccttaaagaatgggggtcgttggagaacttgcttaagaatttagatcaggtcaaaccagagtcagtgcgtgagaagattcttgctcacctcgaagacctcaaattaagccgcgaattgtcccgtgtacgcaccgatttgccgctcgaagttgatttcggtcgccgccgcgaacctgactgggagggtcttaaagcgtttttagagcgtcttgaatttggttcgctcttgcatgaattcggccttttagaaagcccgttactggccgaagaagcaccttggccaccgcccgagggcgcgtttttaggttaccgtttgtggcgcccggaaccgatgtgggccgaattactggctcttgcagcgtctgcccagggacgtgtgtatcgcgcggaagaccctcatggtgcgctccgcggcctcttcgaagtccgtggactccttgccaaagacttagctgttgttgcattgcgcgaaggtcttgatttacctccgactgatgatccaatgcttcttgcgtacctcttggacccgtcaaacacgacgcccgaaggcgtagcccgtcgttacggcggcgagtggaccgaagatgcagcgaaacgcgcgttattggccgaacgtttgcacgaaaatttattaggacgtttgcaaggcgaggaacgtctcctctggctttacgaagaagtggagaaaccattgagtcgcgtgctcgcgcatatggaagctaccggtgtcaaattagacgtggcgtatttggagaatctcagccttgaagttgctgcccacatgcgccgcttggaggaagaagtattccgtttagcaggccgttcctttcgccttaactctcgcgatcagttagaacgtgtgttgttcgatgaacttggtctccctcctatcggcaagacagagaagaccggtaaacgtagcacttcagcggcggttttagaagctcttcgcgaagtccatcccattgtggacaagatcttgcagtaccgcgaaatggcgaaattgaaaggcacctatattgaccgtcttccggcattagtccacccgaaaacgggacgcctccatacccgcttcaaccaaacagccacggcgaccggtcgtttgtcctcctctgatccaaaccttcagaatattccagtacgtaccccattgggccagaagatccgccgtgcgtttgtagctgaggagggttggcgtttagtggccctcgattatcgtcaaattgaattacgtgtccttgcccatctttctggcgatgagaacctcatccgcgtgtttcaggaaggcaaagacattcacactcaaacggcaagctggatgtttggattatcagctgaagcgatcgatcctttgatgcgtcgtgcagcgaagaccatcaatttcggtgttctctacggtatgagtgcctttcgtttgtcgcaggaattaggcattccctatgaagaagctcaggcgttcattcagaaatactttcaaagctatcccaaagttaaagcatggatcgagaagactctccgtgaaggccgcacacgtggttacgtagagaccttatttggacgtcgccgctatgttcccgatttaaacgctcgcgtgaaaggcaagcgtgaagccgccgaacgcatggcgttcaacatgcctgtacagggcacggcagctgacctcatgaaacttgcaatggtgcgcctttttccacaattgcgtgaagttggtgcccgcatgctcttgcaggtccacgatgaactcttgttagaagcgccaaaagagcgtgcggaagaggtggcagccctcgcgaaagaagttatggaaggcgtgtggcccttagcggtgcctcttgaagtcgaagttggtattggcgaggattggctggctgccaaagga

SEQ ID NO: 6076 - protein, 841 aa, synthetic construct
  REGION 1..841: note = Variant of DNA polymerase I from Thermus sp. strain 2.9
MHHHHHHGGSGVLPVFEPKGRVLLVDGHHLAYRNFFALKGLTTSLGEPVQGVYGFAKSLLKALKEDGDVVIVVFDAKAPSFRHEAYEAYKAGRAPTPEDFPRQLALMKELVDLLGLERLEVPGFEADDVLATLAKKAEREGYEVQILTADRDLFQLLSPRISVLHPEGHRITPEWLWEKYGLRPEQWVDFRALAGDPSDNIPGVKGIGEKTALKLLKEWGSLENLLKNLDQVKPESVREKILAHLEDLKLSRELSRVRTDLPLEVDFGRRREPDWEGLKAFLERLEFGSLLHEFGLLESPLLAEEAPWPPPEGAFLGYRLWRPEPMWAELLALAASAQGRVYRAEDPHGALRGLFEVRGLLAKDLAVVALREGLDLPPTDDPMLLAYLLDPSNTTPEGVARRYGGEWTEDAAKRALLAERLHENLLGRLQGEERLLWLYEEVEKPLSRVLAHMEATGVKLDVAYLENLSLEVAAHMRRLEEEVFRLAGRSFRLNSRDQLERVLFDELGLPPIGKTEKTGKRSTSAAVLEALREVHPIVDKILQYREMAKLKGTYIDRLPALVHPKTGRLHTRFNQTATATGRLSSSDPNLQNIPVRTPLGQKIRRAFVAEEGWRLVALDYRQIELRVLAHLSGDENLIRVFQEGKDIHTQTASWMFGLSAEAIDPLMRRAAKTINFGVLYGMSAFRLSQELGIPYEEAQAFIQKYFQSYPKVKAWIEKTLREGRTRGYVETLFGRRRYVPDLNARVKGKREAAERMAFNMPVQGTAADLMKLAMVRLFPQLREVGARMLLQVHDELLLEAPKERAEEVAALAKEVMEGVWPLAVPLEVEVGIGEDWLAAKG

SEQ ID NO: 6077 - DNA, 2523 bp, synthetic construct
  misc_feature 1..2523: note = Variant of DNA polymerase I from Thermus sp. strain 2.9
  source 1..2523: mol_type = other DNA
atgcaccatcatcatcatcatggcggtagcggcgtgttaccggtgttcgagcctaaaggtcgcgtgcttctggttgatggccatcatctcgcgtatcgtaacttctttgccctgaaaggattaaccaccagcctgggcgagccggtacagggtgtctacggctttgcaaagtcgctcctgaaagctctgaaagaagacggtgatgtggtgattgttgtctttgatgcgaaagcgccaagttttcgccacgaagcgtacgaagcttacaaagccgggcgtgctccaacgccggaagactttcctcgccaattggcgcttatgaaggaattagtggatttgcttggcctcgaacgcttggaagttcccggtttcgaggcagacgacgtattagcgactctcgcaaagaaagccgaacgtgagggctatgaagtccagatcttgacagcagatcgcgatcttttccagcttttatctccgcgcatctcggtgttacacccggaagggcatcgtatcaccccggaatggctctgggagaaatatggtttgcgtcccgaacaatgggtggattttcgcgccttagcaggcgatccgagcgacaatattccgggagttaaaggtatcggcgagaagacggcgctcaagctccttaaagaatgggggtcgttggagaacttgcttaagaatttagatcaggtcaaaccagagtcagtgcgtgagaagattcttgctcacctcgaagacctcaaattaagccgcgaattgtcccgtgtacgcaccgatttgccgctcgaagttgatttcggtcgccgccgcgaacctgactgggagggtcttaaagcgtttttagagcgtcttgaatttggttcgctcttgcatgaattcggccttttagaaagcccgttactggccgaagaagcaccttggccaccgcccgagggcgcgtttttaggttaccgtttgagtcgcccggaaccgatgtgggccgaattactggctcttgcagcgtctgcccagggacgtgtgtatcgcgcggaagaccctcatggtgcgctccgcggcctcttcgaagtccgtggactccttgccaaagacttagctgttgttgcattgcgcgaaggtcttgatttacctccgactgatgatccaatgcttcttgcgtacctcttggacccgtcaaacacgacgcccgaaggcgtagcccgtcgttacggcggcgagtggaccgaagatgcagcgaaacgcgcgttattggccgaacgtttgcacgaaaatttattaggacgtttgcaaggcgaggaacgtctcctctggctttacgaagaagtggagaaaccattgagtcgcgtgctcgcgcatatggaagctaccggtgtcaaattagacgtggcgtatttggagaatctcagccttgaagttgctgcccacatgcgccgcttggaggaagaagtattccgtttagcaggccgttcctttcgccttaactctcgcgatcagttagaacgtgtgttgttcgatgaacttggtctccctcctatcggcaagacagagaagaccggtaaacgtagcacttcagcggcggttttagaagctcttcgcgaagtccatcccattgtggacaagatcttgcagtaccgcgaaatggcgaaattgaaaggcacctatattgaccgtcttccggcattagtccacccgaaaacgggacgcctccatacccgcttcaaccaaacagccacggcgaccggtcgtttgtcctcctctgatccaaaccttcagaatattccagtacgtaccccattgggccagtggatccgccgtgcgtttgtagctgaggagggttggcgtttagtggccctcgattatcgtcaaattgaattacgtgtccttgcccatctttctggcgatgagaacctcatccgcgtgtttcaggaaggcaaagacattcacactcaaacggcaagctggatgtttggattatcagctgaagcgatcgatcctttgatgcgtcgtgcagcgaagaccatcaatttcggtgttctctacggtatgagtgcctttcgtttgtcgcaggaattaggcattccctatgaagaagctcaggcgttcattcagaaatactttcaaagctatcccaaagttaaagcatggatcgagaagactctccgtgaaggccgcacacgtggttacgtagagaccttatttggacgtcgccgctatgttcccgatttaaacgctcgcgtgaaaggcaagcgtgaagccgccgaacgcatggcgttcaacatgcctgtacagggcacggcagctgacctcatgaaacttgcaatggtgcgcctttttccacaattgcgtgaagttggtgcccgcatgctcttgcaggtccacgatgaactcttgttagaagcgccaaaagagcgtgcggaagaggtggcagccctcgcgaaagaagttatggaaggcgtgtggcccttagcggtgcctcttgaagtcgaagttggtattggcgaggattggctggctgccaaagga

SEQ ID NO: 6078 - protein, 841 aa, synthetic construct
  REGION 1..841: note = Variant of DNA polymerase I from Thermus sp. strain 2.9
MHHHHHHGGSGVLPVFEPKGRVLLVDGHHLAYRNFFALKGLTTSLGEPVQGVYGFAKSLLKALKEDGDVVIVVFDAKAPSFRHEAYEAYKAGRAPTPEDFPRQLALMKELVDLLGLERLEVPGFEADDVLATLAKKAEREGYEVQILTADRDLFQLLSPRISVLHPEGHRITPEWLWEKYGLRPEQWVDFRALAGDPSDNIPGVKGIGEKTALKLLKEWGSLENLLKNLDQVKPESVREKILAHLEDLKLSRELSRVRTDLPLEVDFGRRREPDWEGLKAFLERLEFGSLLHEFGLLESPLLAEEAPWPPPEGAFLGYRLSRPEPMWAELLALAASAQGRVYRAEDPHGALRGLFEVRGLLAKDLAVVALREGLDLPPTDDPMLLAYLLDPSNTTPEGVARRYGGEWTEDAAKRALLAERLHENLLGRLQGEERLLWLYEEVEKPLSRVLAHMEATGVKLDVAYLENLSLEVAAHMRRLEEEVFRLAGRSFRLNSRDQLERVLFDELGLPPIGKTEKTGKRSTSAAVLEALREVHPIVDKILQYREMAKLKGTYIDRLPALVHPKTGRLHTRFNQTATATGRLSSSDPNLQNIPVRTPLGQWIRRAFVAEEGWRLVALDYRQIELRVLAHLSGDENLIRVFQEGKDIHTQTASWMFGLSAEAIDPLMRRAAKTINFGVLYGMSAFRLSQELGIPYEEAQAFIQKYFQSYPKVKAWIEKTLREGRTRGYVETLFGRRRYVPDLNARVKGKREAAERMAFNMPVQGTAADLMKLAMVRLFPQLREVGARMLLQVHDELLLEAPKERAEEVAALAKEVMEGVWPLAVPLEVEVGIGEDWLAAKG

SEQ ID NO: 6079 - DNA, 2523 bp, synthetic construct
  misc_feature 1..2523: note = Variant of DNA polymerase I from Thermus sp. strain 2.9
  source 1..2523: mol_type = other DNA
atgcaccatcatcatcatcatggcggtagcggcgtgttaccggtgttcgagcctaaaggtcgcgtgcttctggttgatggccatcatctcgcgtatcgtaacttctttgccctgaaaggattaaccaccagccgcggcgagccggtacagggtgtctacggctttgcaaagtcgctcctgaaagctctgaaagaagacggtgatgtggtgattgttgtctttgatgcgaaagcgccaagttttcgccacgaagcgtacgaagcttacaaagccgggcgtgctccaacgccggaagactttcctcgccaattggcgcttatgaaggaattagtggatttgcttggcctcgaacgcttggaagttcccggtttcgaggcagacgacgtattagcgactctcgcaaagaaagccgaacgtgagggctatgaagtccagatcttgacagcagatcgcgatcttttccagcttttatctccgcgcatctcggtgttacacccggaagggcatcgtatcaccccggaatggctctgggagaaatatggtttgcgtcccgaacaatgggtggattttcgcgccttagcaggcgatccgagcgacaatattccgggagttaaaggtatcggcgagaagacggcgctcaagctccttaaagaatgggggtcgttggagaacttgcttaagaatttagatcaggtcaaaccagagtcagtgcgtgagaagattcttgctcacctcgaagacctcaaattaagccgcgaattgtcccgtgtacgcaccgatttgccgctcgaagttgatttcggtcgccgccgcgaacctgactgggagggtcttaaagcgtttttagagcgtcttgaatttggttcgctcttgcatgaattcggccttttagaaagcccgttaccggccgaagaagcaccttggccaccgcccgagggcgcgtttttaggttaccgtttgagtcgcccggaaccgatgtgggccgaattactggctcttgcagcgtctgcccagggacgtgtgtatcgcgcggaagaccctcatggtgcgctccgcggcctcttcgaagtccgtggactccttgccaaagacttagctgttgttgcattgcgcgaaggtcttgatttacctccgactgatgatccaatgcttcttgcgtacctcttggacccgtcaaacacgacgcccgaaggcgtagcccgtcgttacggcggcgagtggaccgaagatgcagcgaaacgcgcgttattggccgaacgtttgcacgaaaatttattaggacgtttgcaaggcgaggaacgtctcctctggctttacgaagaagtggagaaaccattgagtcgcgtgctcgcgcatatggaagctaccggtgtcaaattagacgtggcgtatttggagaatcttagccttgaagttgctgccgaaatgcgccgcttggaggaagaagtattccgtttagcaggccgctcctttcgccttaactctcgcgatcagttagaacgtgtgttgttcgatgaacttggtctccctcctatcggcaagacagagaagaccggtaaacgtagcacttcagcggcggttttagaagctcttcgcgaagtccatcccattgtggacaagatcttgcagtaccgcgaaatggcgaaattgaaaggcacctatattgaccgtcttccggcattagtccacccgaaaacgggacgcctccatacccgcttcaaccaaacagccacggcgaccggtcgtttgtccagttctgatccaaaccttcagaatattccagtacgtaccccattgggccagaagatccgccgtgcgtttgtagctgaggagggttggcgtttagtggccctcgattatagtcaaattgaattacgtgtccttgcccatctttctggcgatgagaacctcatccgcgtgtttcaggaaggcaaagacattcacactcaaacggcaagctggatgtttggattatcagctgaagcgatcgatcctttgatgcgtcgtgcagcgaagaccatcaatttcggtgttctctacggtatgagtgcctttcgtttgtcgcaggaattaggcattccctatgaagaagctcaggcgttcattcagaaatactttcaaagctatcccaaagttaaagcatggatcgagaagactctccgcgaaggccgcacacgtggttacgtagagaccttatttggacgtcgccgctatgttcccgatttaaacgctcgcgtgaaaagcgtacgtgaagccgccgaacgcatggcgttcaacatgcctgtacagggcacggcagctgacctcatgaaacttgcaatggtgcgcctttttccacaattgcgtgaagttggtgcccgcatgctcttgcaggtccacgatgaactcttgttagaagcgccaaaagagcgtgcggaagaggtggcagccctcgcgaaagaagttatggaaggcgtgtggcccttagcggtgcctcttgaagtcgaagttggtattggcgaggattggctggctgccaaagga

SEQ ID NO: 6080 - protein, 841 aa, synthetic construct
  REGION 1..841: note = Variant of DNA polymerase I from Thermus sp. strain 2.9
MHHHHHHGGSGVLPVFEPKGRVLLVDGHHLAYRNFFALKGLTTSRGEPVQGVYGFAKSLLKALKEDGDVVIVVFDAKAPSFRHEAYEAYKAGRAPTPEDFPRQLALMKELVDLLGLERLEVPGFEADDVLATLAKKAEREGYEVQILTADRDLFQLLSPRISVLHPEGHRITPEWLWEKYGLRPEQWVDFRALAGDPSDNIPGVKGIGEKTALKLLKEWGSLENLLKNLDQVKPESVREKILAHLEDLKLSRELSRVRTDLPLEVDFGRRREPDWEGLKAFLERLEFGSLLHEFGLLESPLPAEEAPWPPPEGAFLGYRLSRPEPMWAELLALAASAQGRVYRAEDPHGALRGLFEVRGLLAKDLAVVALREGLDLPPTDDPMLLAYLLDPSNTTPEGVARRYGGEWTEDAAKRALLAERLHENLLGRLQGEERLLWLYEEVEKPLSRVLAHMEATGVKLDVAYLENLSLEVAAEMRRLEEEVFRLAGRSFRLNSRDQLERVLFDELGLPPIGKTEKTGKRSTSAAVLEALREVHPIVDKILQYREMAKLKGTYIDRLPALVHPKTGRLHTRFNQTATATGRLSSSDPNLQNIPVRTPLGQKIRRAFVAEEGWRLVALDYSQIELRVLAHLSGDENLIRVFQEGKDIHTQTASWMFGLSAEAIDPLMRRAAKTINFGVLYGMSAFRLSQELGIPYEEAQAFIQKYFQSYPKVKAWIEKTLREGRTRGYVETLFGRRRYVPDLNARVKSVREAAERMAFNMPVQGTAADLMKLAMVRLFPQLREVGARMLLQVHDELLLEAPKERAEEVAALAKEVMEGVWPLAVPLEVEVGIGEDWLAAKG

SEQ ID NO: 6081 - DNA, 2523 bp, synthetic construct
  misc_feature 1..2523: note = Variant of DNA polymerase I from Thermus sp. strain 2.9
  source 1..2523: mol_type = other DNA
atgcaccatcatcatcatcatggcggtagcggcgtgttaccggtgttcgagcctaaaggtcgcgtgcttctggttgatggccatcatctcgcgtatcgtaacttctttgccctgaaaggattaaccaccagcctgggcgagccggtacagggtgtctacggctttgcaaagtcgctcctgaaagctctgaaagaagacggtgatgtggtgattgttgtctttgatgcgaaagcgccaagttttcgccacgaagcgtacgaagcttacaaagccgggcgtgctccaacgccggaagactttcctcgccaattggcgcttatgaaggaattagtggatttgcttggcctcgaacgcttggaagttcccggtttcgaggcagacgacgtattagcgactctcgcaaagaaagccgaacgtgagggctatgaagtccagatcttgacagcagatcgcgatcttttccagcttttatctccgcgcatctcggtgttacacccggaagggcatcgtatcaccccggaatggctctgggagaaatatggtttgcgtcccgaacaatgggtggattttcgcgccttagcaggcgatccgagcgacaatattccgggagttaaaggtatcggcgagaagacggcgctcaagctccttaaagaatgggggtcgttggagaacttgcttaagaatttagatcaggtcaaaccagagtcagtgcgtgagaagattcttgctcacctcgaagacctcaaattaagccgcgaattgtcccgtgtacgcaccgatttgccgctcgaagttgatttcggtcgccgccgcgaacctgactgggagggtcttaaagcgtttttagagcgtcttgaatttggttcgctcttgcatgaattcggccttttagaaagcccgttactggccgaagaagcaccttggccaccgcccgagggcgcgtttttaggttaccgtttgagtcgcccggaaccgatgtgggccgaattactggctcttgcagcgtctgcccagggacgtgtgtatcgcgcggaagaccctcatggtgcgctccgcggcctcttcgaagtccgtggactccttgccaaagacttagctgttgttgcattgcgcgaaggtcttgatttacctccgactgatgatccaatgcttcttgcgtacctcttggacccgtcaaacacgacgcccgaaggcgtagcccgtcgttacggcggcgagtggaccgaagatgcagcgaaacgcgcgttattggccgaacgtttgcacgaaaatttattaggacgtttgcaaggcgaggcgcgtctcctgtggctttacgaagaagtggagaaaccattgagtcgcgtgctcgcgcatatggaagctaccggtgtcaaattagacgtggcgtatttggagaatctcagccttgaagttgctgcccacatgcgccgcttggaggaagaagtattccgtttagcaggccgttcctttcgccttaactctcgcgatcagttagaacgtgtgttgttcgatgaacttggtctccctcctatcggcaagacagagaagaccggtaaacgtagcacttcagcggcggttttagaagctcttcgcgaagtccatcccattgtggacaagatcttgcagtaccgcgaaatggcgaaattgaaaggcacctatattgaccgtcttccggcattagtccacccgaaaacgggacgcctccatacccgcttcaaccaaacagccacggcgaccggtcgtttgtcctcctctgatccaaaccttcagaatattccagtacgtaccccattgggccagaagatccgccgtgcgtttgtagctgaggagggttggcgtttagtggccctcgattatcgtcaaattgaattacgtgtccttgcccatctttctggcgatgagaacctcatccgcgtgtttcaggaaggcaaagacattcacactcaaacggcaagctggatgtttggattatcagctgaagcgatcgatcctttgatgcgtcgtgcagcgaagaccatcaatttcggtgttctctacggtatgagtgcctttcgtttgtcgcaggaattaggcattccctatgaagaagctcaggcgttcattcagaaatactttcaaagctatcccaaagttaaagcatggatcgagaagactctccgtgaaggccgcacacgtggttacgtagagaccttatttggacgtcgccgctatgttcccgatttaaactcgcgcgtgaaaggcaagcgtgaagccgccgaacgcatggcgttcaacatgcctgtacagggcacggcagctgacctcatgaaacttgcaatggtgcgcctttttccacaattgcgtgaagttggtgcccgcatggatttgcaggtccacgatgaactcttgttagaagcgccaaaagagcgtgcggaagaggtggcagccctcgcgaaagaagttatggaaggcgtgtggcccttagcggtgcctcttgaagtcgaagttggtattggcgaggattggctggctgccaaagga

SEQ ID NO: 6082 - protein, 841 aa, synthetic construct
  REGION 1..841: note = Variant of DNA polymerase I from Thermus sp. strain 2.9
MHHHHHHGGSGVLPVFEPKGRVLLVDGHHLAYRNFFALKGLTTSLGEPVQGVYGFAKSLLKALKEDGDVVIVVFDAKAPSFRHEAYEAYKAGRAPTPEDFPRQLALMKELVDLLGLERLEVPGFEADDVLATLAKKAEREGYEVQILTADRDLFQLLSPRISVLHPEGHRITPEWLWEKYGLRPEQWVDFRALAGDPSDNIPGVKGIGEKTALKLLKEWGSLENLLKNLDQVKPESVREKILAHLEDLKLSRELSRVRTDLPLEVDFGRRREPDWEGLKAFLERLEFGSLLHEFGLLESPLLAEEAPWPPPEGAFLGYRLSRPEPMWAELLALAASAQGRVYRAEDPHGALRGLFEVRGLLAKDLAVVALREGLDLPPTDDPMLLAYLLDPSNTTPEGVARRYGGEWTEDAAKRALLAERLHENLLGRLQGEARLLWLYEEVEKPLSRVLAHMEATGVKLDVAYLENLSLEVAAHMRRLEEEVFRLAGRSFRLNSRDQLERVLFDELGLPPIGKTEKTGKRSTSAAVLEALREVHPIVDKILQYREMAKLKGTYIDRLPALVHPKTGRLHTRFNQTATATGRLSSSDPNLQNIPVRTPLGQKIRRAFVAEEGWRLVALDYRQIELRVLAHLSGDENLIRVFQEGKDIHTQTASWMFGLSAEAIDPLMRRAAKTINFGVLYGMSAFRLSQELGIPYEEAQAFIQKYFQSYPKVKAWIEKTLREGRTRGYVETLFGRRRYVPDLNSRVKGKREAAERMAFNMPVQGTAADLMKLAMVRLFPQLREVGARMDLQVHDELLLEAPKERAEEVAALAKEVMEGVWPLAVPLEVEVGIGEDWLAAKG

SEQ ID NO: 6083 - DNA, 2523 bp, synthetic construct
  misc_feature 1..2523: note = Variant of DNA polymerase I from Thermus sp. strain 2.9
  source 1..2523: mol_type = other DNA
atgcaccatcatcatcatcatggcggtagcggcgtgttaccggtgttcgagcctaaaggtcgcgtgcttctggttgatggccatcatctcgcgtatcgtaacttctttgccctgaaaggattaaccaccagcctgggcgagccggtacagggtgtctacggctttgcaaagtcgctcctgaaagctctgaaagaagacggtgatgtggtgattgttgtctttgatgcgaaagcgccaagttttcgccacgaagcgtacgaagcttacaaagccgggcgtgctccaacgccggaagactttcctcgccaattggcgcttatgaaggaattagtggatttgcttggcctcgaacgcttggaagttcccggtttcgaggcagacgacgtattagcgactctcgcaaagaaagccgaacgtgagggctatgaagtccagatcttgacagcagatcgcgatcttttccagcttttatctccgcgcatctcggtgttacacccggaagggcatcgtatcaccccggaatggctctgggagaaatatggtttgcgtcccgaacaatgggtggattttcgcgccttagcaggcgatccgagcgacaatattccgggagttaaaggtatcggcgagaagacggcgctcaagctccttaaagaatgggggtcgttggagaacttgcttaagaatttagatcaggtcaaaccagagtcagtgcgtgagaagattcttgctcacctcgaagacctcaaattaagccgcgaattgtcccgtgtacgcaccgatttgccgctcgaagttgatttcggtcgccgccgcgaacctgactgggagggtcttaaagcgtttttagagcgtcttgaatttggttcgctcttgcatgaattcggccttttagaaagcccgttactggccgaagaagcaccttggccaccgcccgagggcgcgtttttaggttaccgtttgagtcgcccggaaccgatgtgggccgaattactggctcttgcagcgtctgcccagggacgtgtgtatcgcgcggaagaccctcatggtgcgctccgcggcctcttcgaagtccgtggcctccttgccaaagacttagctgttgttgcattgcgcgaaggtcttgatttacctccgactgatgatccaatgcttcttgcgtacctcttggacccgtcaaacacgacgcccgaaggcgtagcccgtcgttacggcggcgagtggaccgaagatgcaggcaaacgcgcgttattggccgaacgtttgcacgaaaatttattaggacgtttgcaaggcgaggaacgtctcctctggctttacgaagaagtggagaaaccattgagtcgcgtgctcgcgcatatggaagctaccggtgtcaaattagacgtggcgtatttggagaatctcagccttgaagttgctgcccacatgcgccgcttggaggaagaagtattccgtttagcaggccgttcctttcgccttaactctcgcgatcagttagaacgtgtgttgttcgatgaacttggtctccctcctatcggcaagacagagaagaccggtaaacgtagcacttcagcggcggttttagaagctcttcgcgaagtccatcccattgtggacaagatcttgcagtaccgcgaaatggcgaaattgaaaggcacctatattgaccgtcttccggcattagtccacccgaaaacgggacgcctccatacccgcttcaaccaaacagccacggcgaccggtcgtttgtcctcctctgatccaaaccttcagaatattccagtacgtaccccattgggccagaagatccgccgtgcgtttgtagctgagccgggttgggcgttagtggccctcgattatcgtcaaattgaattacgtgtccttgcccatctttctggcgatgagaacctcatccgcgtgtttcaggaaggcaaagacattcacactcaaacggcaagctggatgtttggattatcagctgaagcgatcgatcctttgatgcgtcgtgcagcgaagaccatcaatttcggtgttctctacggtatgagtgcctttcgtttgtcgcaggaattaggcattccctatgaagaagctcaggctttcattcagaaatactttcaaggctatcccaaagttaaagcatggatcgagaagactctccgtgaaggccgcacacgtggttacgtagagaccttatttggacgtcgccgctatgttcccgatttaaactcgcgcgtgaaaggcaagcgtgaagccgccgaacgcatggcgttcaacatgcctgtacagggcacggcagctgacctcatgaaacttgcaatggtgcgcctttttccacaattgcgtgaagttggtgcccgcatggatttgcaggtccacgatgaactcttgttagaagcgccaaaagagcgtgcggaagaggtggcagccctcgcgaaagaagttatggaaggcgtgtggcccttagcggtgcctcttgaagtcgaagttggtattggcgaggattggctggctgccaaagga

SEQ ID NO: 6084 - protein, 841 aa, synthetic construct
  REGION 1..841: note = Variant of DNA polymerase I from Thermus sp. strain 2.9
MHHHHHHGGSGVLPVFEPKGRVLLVDGHHLAYRNFFALKGLTTSLGEPVQGVYGFAKSLLKALKEDGDVVIVVFDAKAPSFRHEAYEAYKAGRAPTPEDFPRQLALMKELVDLLGLERLEVPGFEADDVLATLAKKAEREGYEVQILTADRDLFQLLSPRISVLHPEGHRITPEWLWEKYGLRPEQWVDFRALAGDPSDNIPGVKGIGEKTALKLLKEWGSLENLLKNLDQVKPESVREKILAHLEDLKLSRELSRVRTDLPLEVDFGRRREPDWEGLKAFLERLEFGSLLHEFGLLESPLLAEEAPWPPPEGAFLGYRLSRPEPMWAELLALAASAQGRVYRAEDPHGALRGLFEVRGLLAKDLAVVALREGLDLPPTDDPMLLAYLLDPSNTTPEGVARRYGGEWTEDAGKRALLAERLHENLLGRLQGEERLLWLYEEVEKPLSRVLAHMEATGVKLDVAYLENLSLEVAAHMRRLEEEVFRLAGRSFRLNSRDQLERVLFDELGLPPIGKTEKTGKRSTSAAVLEALREVHPIVDKILQYREMAKLKGTYIDRLPALVHPKTGRLHTRFNQTATATGRLSSSDPNLQNIPVRTPLGQKIRRAFVAEPGWALVALDYRQIELRVLAHLSGDENLIRVFQEGKDIHTQTASWMFGLSAEAIDPLMRRAAKTINFGVLYGMSAFRLSQELGIPYEEAQAFIQKYFQGYPKVKAWIEKTLREGRTRGYVETLFGRRRYVPDLNSRVKGKREAAERMAFNMPVQGTAADLMKLAMVRLFPQLREVGARMDLQVHDELLLEAPKERAEEVAALAKEVMEGVWPLAVPLEVEVGIGEDWLAAKG

SEQ ID NO: 6085 - DNA, 2523 bp, synthetic construct
  misc_feature 1..2523: note = Variant of DNA polymerase I from Thermus sp. strain 2.9
  source 1..2523: mol_type = other DNA
atgcaccatcatcatcatcatggcggtagcggcgtgttaccggtgttcgagcctaaaggtcgcgtgcttctggttgatggccatcatctcgcgtatcgtaacttctttgccctgaaaggattaaccaccagcctgggcgagccggtacagggtgtctacggctttgcaaagtcgctcctgaaagctctgaaagaagacggtgatgtggtgattgttgtctttgatgcgaaagcgccaagttttcgccacgaagcgtacgaagcttacaaagccgggcgtgctccaacgccggaagactttcctcgccaattggcgcttatgaaggaattagtggatttgcttggcctcgaacgcttggaagttcccggtttcgaggcagacgacgtattagcgactctcgcaaagaaagccgaacgtgagggctatgaagtccagatcttgacagcagatcgcgatcttttccagcttttatctccgcgcatctcggtgttacacccggaagggcatcgtatcaccccggaatggctctgggagaaatatggtttgcgtcccgaacaatgggtggattttcgcgccttagcaggcgatccgagcgacaatattccgggagttaaaggtatcggcgagaagacggcgctcaagctccttaaagaatgggggtcgttggagaacttgcttaagaatttagatcaggtcaaaccagagtcagtgcgtgagaagattcttgctcacctcgaagacctcaaattaagccgcgaattgtcccgtgtacgcaccgatttgccgctcgaagttgatttcggtcgccgccgcgaacctgactgggagggtcttaaagcgtttttagagcgtcttgaatttggttcgctcttgcatgaattcggccttttagaaagcccgttactggccgaagaagcaccttggccaccgcccgagggcgcgtttttaggttaccgtttgagtcgcccggaaccgatgtgggccgaattactggctcttgcagcgtctgcccagggacgtgtgtatcgcgcggaagaccctcatggtgcgctccgcggcctcttcgaagtccgtggactccttgccaaagacttagctgttgttgcattgcgcgaaggtcttgatttacctccgactgatgatccaatgcttcttgcgtacctcttggacccgtcaaacacgacgcccgaaggcgtagcccgtcgttactttggcgagtggaccgaagatgcagcgaaacgcgcgttattggccgaacgtttgcacgaaaatttattaggacgtttgcaaggcgaggaacgtctcctctggctttacgaagaagtggagaaaccattgagtcgcgtgctcgcgcatatggaagctaccggtgtcaaattagacgtggcgtatttggagaatctcagccttgaagttgctgcccacatgcgccgcttggaggaagaagtattccgtttagcaggccgttcctttcgccttaactctcgcgatcagttagaacgtgtgttgttcgatgaacttggtctccctcctatcggcaagacagagaagaccggtaaacgtagcacttcagcggcggttttagaagctcttcgcgaagtccatcccattgtggacaagatcttgcagtaccgcgaaatggcgaaattgaaaggcacctatattgaccgtcttccggcattagtccacccgaaaacgggacgcctccatacccgcttcaaccaaacagccacggcgaccggtcgtttgtcctcctctgatccaaaccttcagaatattccagtacgtaccccattgggccagaagatccgccgtgcgtttgtagctgaggagggttggcgtttagtggccctcgattatcgtcaaattgaattacgtgtccttgcccatctttctggcgatgagaacctcatccgcgtgtttcaggaaggcaaagacattcacactcaaacggcaagctggatgtttggattatcagctgaagcgatcgatcctttgatgcgtcgtgcagcgaagaccatcaatttcggtgttctctacggtatgagtgcctttcgtttgtcgcaggaattaggcattccctatgaagaagctcaggcgttcattcagaaatactttcaaagctatcccaaagttaaagcatggatcgagaagactctccgtgaaggccgcacacgtggttacgtagagaccttatttggacgtcgccgctatgttcccgatttaaacgctcgcgtgaaaggcaagcgtgaagccgccgaacgcatggcgttcaacatgcctgtacagggcacggcagctgacctcatgaaacttgcaatggtgcgcctttttccacaattgcgtgaagttggtgcccgcatgctcttgcaggtccacgatgaactcttgttagaagcgccaaaagagcgtgcggaagaggtggcagccctcgcgaaagaagttatggaaggcgtgtggcccttagcggtgcctcttgaagtcgaagttggtattggcgaggattggctggctgccaaagga

SEQ ID NO: 6086 - protein, 841 aa, synthetic construct
  REGION 1..841: note = Variant of DNA polymerase I from Thermus sp. strain 2.9
MHHHHHHGGSGVLPVFEPKGRVLLVDGHHLAYRNFFALKGLTTSLGEPVQGVYGFAKSLLKALKEDGDVVIVVFDAKAPSFRHEAYEAYKAGRAPTPEDFPRQLALMKELVDLLGLERLEVPGFEADDVLATLAKKAEREGYEVQILTADRDLFQLLSPRISVLHPEGHRITPEWLWEKYGLRPEQWVDFRALAGDPSDNIPGVKGIGEKTALKLLKEWGSLENLLKNLDQVKPESVREKILAHLEDLKLSRELSRVRTDLPLEVDFGRRREPDWEGLKAFLERLEFGSLLHEFGLLESPLLAEEAPWPPPEGAFLGYRLSRPEPMWAELLALAASAQGRVYRAEDPHGALRGLFEVRGLLAKDLAVVALREGLDLPPTDDPMLLAYLLDPSNTTPEGVARRYFGEWTEDAAKRALLAERLHENLLGRLQGEERLLWLYEEVEKPLSRVLAHMEATGVKLDVAYLENLSLEVAAHMRRLEEEVFRLAGRSFRLNSRDQLERVLFDELGLPPIGKTEKTGKRSTSAAVLEALREVHPIVDKILQYREMAKLKGTYIDRLPALVHPKTGRLHTRFNQTATATGRLSSSDPNLQNIPVRTPLGQKIRRAFVAEEGWRLVALDYRQIELRVLAHLSGDENLIRVFQEGKDIHTQTASWMFGLSAEAIDPLMRRAAKTINFGVLYGMSAFRLSQELGIPYEEAQAFIQKYFQSYPKVKAWIEKTLREGRTRGYVETLFGRRRYVPDLNARVKGKREAAERMAFNMPVQGTAADLMKLAMVRLFPQLREVGARMLLQVHDELLLEAPKERAEEVAALAKEVMEGVWPLAVPLEVEVGIGEDWLAAKG

SEQ ID NO: 6087 - DNA, 2523 bp, synthetic construct
  misc_feature 1..2523: note = Variant of DNA polymerase I from Thermus sp. strain 2.9
  source 1..2523: mol_type = other DNA
atgcaccatcatcatcatcatggcggtagcggcgtgttaccggtgttcgagcctaaaggtcgcgtgcttctggttgatggccatcatctcgcgtatcgtaacttctttgccctgaaaggattaaccaccagcctgggcgagccggtacagggtgtctacggctttgcaaagtcgctcctgaaagctctgaaagaagacggtgatgtggtgattgttgtctttgatgcgaaagcgccaagttttcgccacgaagcgtacgaagcttacaaagccgggcgtgctccaacgccggaagactttcctcgccaattggcgcttatgaaggaattagtggatttgcttggcctcgaacgcttggaagttcccggtttcgaggcagacgacgtattagcgactctcgcaaagaaagccgaacgtgagggctatgaagtccagatcttgacagcagatcgcgatcttttccagcttttatctccgcgcatctcggtgttacacccggaagggcatcgtatcaccccggaatggctctgggagaaatatggtttgcgtcccgaacaatgggtggattttcgcgccttagcaggcgatccgagcgacaatattccgggagttaaaggtatcggcgagaagacggcgctcaagctccttaaagaatgggggtcgttggagaacttgcttaagaatttagatcaggtcaaaccagagtcagtgcgtgagaagattcttgctcacctcgaagacctcaaattaagccgcgaattgtcccgtgtacgcaccgatttgccgctcgaagttgatttcggtcgccgccgcgaacctgactgggagggtcttaaagcgtttttagagcgtcttgaatttggttcgctcttgcatgaattcggccttttagaaagcccgttactggccgaagaagcaccttggccaccgcccgagggcgcgtttttaggttaccgtttgagtcgcccggaaccgatgtgggccgaattactggctcttgcagcgtctgcccagggacgtgtgtatcgcgcggaagaccctcatggtgcgctccgcggcctcttcgaagtccgtggactccttgccaaagacttagctgttgttgcattgcgcgaaggtcttgatttacctccgactgatgatccaatgcttcttgcgtacctcttggacccgtcaaacacgacgcccgaaggcgtagcccgtcgttacggcggcgagtggaccgaagatgcagcgaaacgcgcgttattggccgaacgtttgcacgaaaatttattaggacgtttgcaaggcgaggaacgtctcctctggctttacgaagaagtggagaaaccattgagtcgcgtgctcgcgcatatggaagctaccggtgtcaaattagacgtggcgtatttggagaatctcagccttgaagttgctgcccacatgcgccgcttggaggaagaagtattccgtttagcaggccgttcctttcgccttaactctcgcgatcagttagaacgtgtgttgttcgatgaacttggtctccctcctatcggcaagacagagaagaccggtaaacgtagcacttcagcggcggttttagaagctcttacggaagtccatcccattgtggacaagatcttgcagtaccgcgaaatggcgaaattgaaaggcacctatattgaccgtcttccggcattagtccacccgaaaacgggacgcctccatacccgcttcaaccaaacagccacggcgaccggtcgtttgtcctcctctgatccaaaccttcagaatattccagtacgtaccccattgggccagaagatccgccgtgcgtttgtagctgaggagggttggcgtttagtggccctcgattatcgtcaaattgaattacgtgtccttgcccatctttctggcgatgagaacctcatccgcgtgtttcaggaaggcaaagacattcacactcaaacggcaagctggatgtttggattatcagctgaagcgatcgatcctttgatgcgtcgtgcagcgaagaccatcaatttcggtgttctctacggtatgagtgcctttcgtttgtcgcaggaattaggcattccctatgaagaagctcaggcgttcattcagaaatactttcaaagctatcccaaagttaaagcatggatcgagaagactctccgtgaaggccgcacacgtggttacgtagagaccttatttggacgtcgccgctatgttcccgatttaaacgctcgcgtgaaaggcaagcgtgaagccgccgaacgcatggcgttcaacatgcctgtacagggcacggcagctgacctcatgaaacttgcaatggtgcgcctttttccacaattgcgtgaagttggtgcccgcatgctcttgcaggtccacgatgaactcttgttagaagcgccaaaagagcgtgcggaagaggtggcagccctcgcgaaagaagttatggaaggcgtgtggcccttagcggtgcctcttgaagtcgaagttggtattggcgaggattggctggctgccaaagga

SEQ ID NO: 6088 - protein, 841 aa, synthetic construct
  REGION 1..841: note = Variant of DNA polymerase I from Thermus sp. strain 2.9
MHHHHHHGGSGVLPVFEPKGRVLLVDGHHLAYRNFFALKGLTTSLGEPVQGVYGFAKSLLKALKEDGDVVIVVFDAKAPSFRHEAYEAYKAGRAPTPEDFPRQLALMKELVDLLGLERLEVPGFEADDVLATLAKKAEREGYEVQILTADRDLFQLLSPRISVLHPEGHRITPEWLWEKYGLRPEQWVDFRALAGDPSDNIPGVKGIGEKTALKLLKEWGSLENLLKNLDQVKPESVREKILAHLEDLKLSRELSRVRTDLPLEVDFGRRREPDWEGLKAFLERLEFGSLLHEFGLLESPLLAEEAPWPPPEGAFLGYRLSRPEPMWAELLALAASAQGRVYRAEDPHGALRGLFEVRGLLAKDLAVVALREGLDLPPTDDPMLLAYLLDPSNTTPEGVARRYGGEWTEDAAKRALLAERLHENLLGRLQGEERLLWLYEEVEKPLSRVLAHMEATGVKLDVAYLENLSLEVAAHMRRLEEEVFRLAGRSFRLNSRDQLERVLFDELGLPPIGKTEKTGKRSTSAAVLEALTEVHPIVDKILQYREMAKLKGTYIDRLPALVHPKTGRLHTRFNQTATATGRLSSSDPNLQNIPVRTPLGQKIRRAFVAEEGWRLVALDYRQIELRVLAHLSGDENLIRVFQEGKDIHTQTASWMFGLSAEAIDPLMRRAAKTINFGVLYGMSAFRLSQELGIPYEEAQAFIQKYFQSYPKVKAWIEKTLREGRTRGYVETLFGRRRYVPDLNARVKGKREAAERMAFNMPVQGTAADLMKLAMVRLFPQLREVGARMLLQVHDELLLEAPKERAEEVAALAKEVMEGVWPLAVPLEVEVGIGEDWLAAKG

SEQ ID NO: 6089 - DNA, 2523 bp, synthetic construct
  misc_feature 1..2523: note = Variant of DNA polymerase I from Thermus sp. strain 2.9
  source 1..2523: mol_type = other DNA
atgcaccatcatcatcatcatggcggtagcggcgtgttaccggtgttcgagcctaaaggtcgcgtgcttctggttgatggccatcatctcgcgtatcgtaacttctttgccctgaaaggattaaccaccagcctgggcgagccggtacagggtgtctacggctttgcaaagtcgctcctgaaagctctgaaagaagacggtgatgtggtgattgttgtctttgatgcgaaagcgccaagttttcgccacgaagcgtacgaagcttacaaagccgggcgtgctccaacgccggaagactttcctcgccaattggcgcttatgaaggaattagtggatttgcttggcctcgaacgcttggaagttcccggtttcgaggcagacgacgtattagcgactctcgcaaagaaagccgaacgtgagggctatgaagtccagatcttgacagcagatcgcgatcttttccagcttttatctccgcgcatctcggtgttacacccggaagggcatcgtatcaccccggaatggctctgggagaaatatggtttgcgtcccgaacaatgggtggattttcgcgccttagcaggcgatccgagcgacaatattccgggagttaaaggtatcggcgagaagacggcgctcaagctccttaaagaatgggggtcgttggagaacttgcttaagaatttagatcaggtcaaaccagagtcagtgcgtgagaagattcttgctcacctcgaagacctcaaattaagccgcgaattgtcccgtgtacgcaccgatttgccgctcgaagttgatttcggtcgccgccgcgaacctgactgggagggtcttaaagcgtttttagagcgtcttgaatttggttcgctcttgcatgaattcggccttttagaaagcccgttactggccgaagaagcaccttggccaccgcccgagggcgcgtttttaggttaccgtttgagtcgcccggaaccgatgtgggccgaattactggctcttgcagcgtctgcccagggacgtgtgtatcgcgcggaagaccctcatggtgcgctccgcggcctcttcgaagtccgtggactccttgccaaagacttagctgttgttgcattgcgcgaaggtcttgatttacctccgactgatgatccaatgcttcttgcgtacctcttggacccgtcaaacacgacgcccgaaggcgtagcccgtcgttacggcggcgagtggaccgaagatgcagcgaaacgcgcgttattggccgaacgtttgcacgaaaatttattaggacgtttgcaaggcgaggaacgtctcctctggctttacgaagaagtggagaaaccattgagtcgcgtgctcgcgcatatggaagctaccggtgtcaaattagacgtggcgtatttggagaatctcagccttgaagttgctgcccacatgcgccgcttggaggaagaagtattccgtttagcaggccgttcctttcgccttaactctcgcgatcagttagaacgtgtgttgttcgatgaacttggtctccctcctatcggcaagacagagaagaccggtaaacgtagcacttcagcggcggttttagaagctcttcgcgaagtccatcccattgtggacaagatcttgcagtaccgcgaaatggcgaaattgaaaggcacctatattgaccgtcttccggcattagtccacccgaaaacgggacgcctccatacccgcttcaaccaaacagccacggcgaccggtcgtttgtcctcctctgatccaaaccttcagaatattccagtacgtaccccattgggccagaagatccgccgtgcgtttgtagctgaggagggttggcgtttagtggccctcgattatcgtcaaattgaattacgtgtccttgcccatctttctggcgatgagaacctcatccgcgtgtttcaggaaggcaaagacattcacactcaaacggcaagctggatgtttggattatcagctgaagcgatcgatcctttgatgcgtcgtgcagcgaagaccatcaatttcggtgttctctacggtatgagtgcctttcgtttgtcgcaggaattaggcattccctatgaagaagctcaggcgttcattcagaaatactttcaaagctatcccaaagttaaagcatggatcgagaagactctccgtgaaggccgcacacgtggttacgtagagaccttatttggacgtcgccgctatgttcccgatttaaacgctcgcgtgaaaggcaagcgtgaagccgccgaacgcatggcgttcaacatgcctgtacagggcacggcagctgacctcatgaaacttgcaatggtgcgcctttttccacaattgcgtgaagttggtgcccgcatgctcttgcaggtccacgatgaactcttgttagaagcgccaaaagagcgtgcggaagaggtggcagccagggcgaaagaagttatggaaggcgtgtggcccttagcggtgcctcttgaagtcgaagttggtattggcgaggattggctggctgccaaagga

SEQ ID NO: 6090 - protein, 841 aa, synthetic construct
  REGION 1..841: note = Variant of DNA polymerase I from Thermus sp. strain 2.9
MHHHHHHGGSGVLPVFEPKGRVLLVDGHHLAYRNFFALKGLTTSLGEPVQGVYGFAKSLLKALKEDGDVVIVVFDAKAPSFRHEAYEAYKAGRAPTPEDFPRQLALMKELVDLLGLERLEVPGFEADDVLATLAKKAEREGYEVQILTADRDLFQLLSPRISVLHPEGHRITPEWLWEKYGLRPEQWVDFRALAGDPSDNIPGVKGIGEKTALKLLKEWGSLENLLKNLDQVKPESVREKILAHLEDLKLSRELSRVRTDLPLEVDFGRRREPDWEGLKAFLERLEFGSLLHEFGLLESPLLAEEAPWPPPEGAFLGYRLSRPEPMWAELLALAASAQGRVYRAEDPHGALRGLFEVRGLLAKDLAVVALREGLDLPPTDDPMLLAYLLDPSNTTPEGVARRYGGEWTEDAAKRALLAERLHENLLGRLQGEERLLWLYEEVEKPLSRVLAHMEATGVKLDVAYLENLSLEVAAHMRRLEEEVFRLAGRSFRLNSRDQLERVLFDELGLPPIGKTEKTGKRSTSAAVLEALREVHPIVDKILQYREMAKLKGTYIDRLPALVHPKTGRLHTRFNQTATATGRLSSSDPNLQNIPVRTPLGQKIRRAFVAEEGWRLVALDYRQIELRVLAHLSGDENLIRVFQEGKDIHTQTASWMFGLSAEAIDPLMRRAAKTINFGVLYGMSAFRLSQELGIPYEEAQAFIQKYFQSYPKVKAWIEKTLREGRTRGYVETLFGRRRYVPDLNARVKGKREAAERMAFNMPVQGTAADLMKLAMVRLFPQLREVGARMLLQVHDELLLEAPKERAEEVAARAKEVMEGVWPLAVPLEVEVGIGEDWLAAKG

SEQ ID NO: 6091 - DNA, 2523 bp, synthetic construct
  misc_feature 1..2523: note = Variant of DNA polymerase I from Thermus sp. strain 2.9
  source 1..2523: mol_type = other DNA
atgcaccatcatcatcatcatggcggtagcggcgtgttaccggtgttcgagcctaaaggtcgcgtgcttctggttgatggccatcatctcgcgtatcgtaacttctttgccctgaaaggattaaccaccagcctgggcgagccggtacagggtgtctacggctttgcaaagtcgctcctgaaagctctgaaagaagacggtgatgtggtgattgttgtctttgatgcgaaagcgccaagttttcgccacgaagcgtacgaagcttacaaagccgggcgtgctccaacgccggaagactttcctcgccaattggcgcttatgaaggaattagtggatttgcttggcctcgaacgcttggaagttcccggtttcgaggcagacgacgtattagcgactctcgcaaagaaagccgaacgtgagggctatgaagtccagatcttgacagcagatcgcgatcttttccagcttttatctccgcgcatctcggtgttacacccggaagggcatcgtatcaccccggaatggctctgggagaaatatggtttgcgtcccgaacaatgggtggattttcgcgccttagcaggcgatccgagcgacaatattccgggagttaaaggtatcggcgagaagacggcgctcaagctccttaaagaatgggggtcgttggagaacttgcttaagaatttagatcaggtcaaaccagagtcagtgcgtgagaagattcttgctcacctcgaagacctcaaattaagccgcgaattgtcccgtgtacgcaccgatttgccgctcgaagttgatttcggtcgccgccgcgaacctgactgggagggtcttaaagcgtttttagagcgtcttgaatttggttcgctcttgcatgaattcggccttttagaaagcccgttactggccgaagaagcaccttggccaccgcccgagggcgcgtttttaggttaccgtttgagtcgcccggaaccgatgtgggccgaattactggctcttgcagcgtctgcccagggacgtgtgtatcgcgcggaagaccctcatggtgcgctccgcggcctcttcgaagtccgtggactccttgccaaagacttagctgttgttgcattgcgcgaaggtcttgatttacctccgactgatgatccaatgcttcttgcgtacctcttggacccgtcaaacacgacgcccgaaggcgtagcccgtcgttacggcggcgagtggaccgaagatgcagcgaaacgcgcgttattggccgaacgtttgcacgaaaatttattaggacgtttgcaaggcgaggaacgtctcctctggctttacgaagaagtggagaaaccattgagtcgcgtgctcgcgcatatggaagctaccggtgtcaaattagacgtggcgtatttggagaatctcagccttgaagttgctgcccacatgcgccgcttggaggaagaagtattccgtttagcaggccgttcctttcgccttaactctcgcgatcagttagaacgtgtgttgttcgatgaacttggtctccctcctatcggcaagacagagaagaccggtaaacgtagcacttcagcggcggttttagaagctcttcgcgaagtccatcccattgtggacaagatcttgcagtaccgcgaaatggcgaaattgaaaggcacctatattgaccgtcttccggcattagtccacccgaaaacgggacgcctccatacccgcttcaaccaaacagccacggcgaccggtcgtttgtcctcctctgatccaaaccttcagaatattccagtacgtaccccattgggccagaagatccgccgtgcgtttgtagctgaggagggttggcgtttagtggccctcgattatcgtcaaattgaattacgtgtccttgcccatctttctggcgatgagaacctcatccgcgtgtttcaggaaggcaaagacattcacactcaaacggcaagctggatgtttggattatcagctgaagcgatcgatcctttgatgcgtcgtgcagcgaagaccatcaatttcggtgttctctacggtatgagtgcctttcgtttgtcgcaggaattaggcattccctatgaagaagctcaggcgttcattcagaaatactttcaaagctatcccaaagttaaagcatggatcgagaagactctccgtgaaggccgcacacgtggttacgtagagaccttatttggacgtcgccgctatgttcccgatttaaacgctcgcgtgaaaggcaagcgtgaagccgccgaacgcatggcgttcaacatgcctgtacagggcacggcagctgacctcatgaaacttgcaatggtgcgcctttttccacaattgcgtgaagttggtgcccgcatgctcttggcggtccacgatgaactcttgttagaagcgccaaaagagcgtgcggaagaggtggcagccctcgcgaaagaagttatggaaggcgtgtggcccttagcggtgcctcttgaagtcgaagttggtattggcgaggattggctggctgccaaagga

SEQ ID NO: 6092 - protein, 841 aa, synthetic construct
  REGION 1..841: note = Variant of DNA polymerase I from Thermus sp. strain 2.9
MHHHHHHGGSGVLPVFEPKGRVLLVDGHHLAYRNFFALKGLTTSLGEPVQGVYGFAKSLLKALKEDGDVVIVVFDAKAPSFRHEAYEAYKAGRAPTPEDFPRQLALMKELVDLLGLERLEVPGFEADDVLATLAKKAEREGYEVQILTADRDLFQLLSPRISVLHPEGHRITPEWLWEKYGLRPEQWVDFRALAGDPSDNIPGVKGIGEKTALKLLKEWGSLENLLKNLDQVKPESVREKILAHLEDLKLSRELSRVRTDLPLEVDFGRRREPDWEGLKAFLERLEFGSLLHEFGLLESPLLAEEAPWPPPEGAFLGYRLSRPEPMWAELLALAASAQGRVYRAEDPHGALRGLFEVRGLLAKDLAVVALREGLDLPPTDDPMLLAYLLDPSNTTPEGVARRYGGEWTEDAAKRALLAERLHENLLGRLQGEERLLWLYEEVEKPLSRVLAHMEATGVKLDVAYLENLSLEVAAHMRRLEEEVFRLAGRSFRLNSRDQLERVLFDELGLPPIGKTEKTGKRSTSAAVLEALREVHPIVDKILQYREMAKLKGTYIDRLPALVHPKTGRLHTRFNQTATATGRLSSSDPNLQNIPVRTPLGQKIRRAFVAEEGWRLVALDYRQIELRVLAHLSGDENLIRVFQEGKDIHTQTASWMFGLSAEAIDPLMRRAAKTINFGVLYGMSAFRLSQELGIPYEEAQAFIQKYFQSYPKVKAWIEKTLREGRTRGYVETLFGRRRYVPDLNARVKGKREAAERMAFNMPVQGTAADLMKLAMVRLFPQLREVGARMLLAVHDELLLEAPKERAEEVAALAKEVMEGVWPLAVPLEVEVGIGEDWLAAKG

SEQ ID NO: 6093 - DNA, 2523 bp, synthetic construct
  misc_feature 1..2523: note = Variant of DNA polymerase I from Thermus sp. strain 2.9
  source 1..2523: mol_type = other DNA
atgcaccatcatcatcatcatggcggtagcggcgtgttaccggtgttcgagcctaaaggtcgcgtgcttctggttgatggccatcatctcgcgtatcgtaacttctttgccctgaaaggattaaccaccagcctgggcgagccggtacagggtgtctacggctttgcaaagtcgctcctgaaagctctgaaagaagacggtgatgtggtgattgttgtctttgatgcgaaagcgccaagttttcgccacgaagcgtacgaagcttacaaagccgggcgtgctccaacgccggaagactttcctcgccaattggcgcttatgaaggaattagtggatttgcttggcctcgaacgcttggaagttcccggtttcgaggcagacgacgtattagcgactctcgcaaagaaagccgaacgtgagggctatgaagtccagatcttgacagcagatcgcgatcttttccagcttttatctccgcgcatctcggtgttacacccggaagggcatcgtatcaccccggaatggctctgggagaaatatggtttgcgtcccgaacaatgggtggattttcgcgccttagcaggcgatccgagcgacaatattccgggagttaaaggtatcggcgagaagacggcgctcaagctccttaaagaatgggggtcgttggagaacttgcttaagaatttagatcaggtcaaaccagagtcagtgcgtgagaagattcttgctcacctcgaagacctcaaattaagccgcgaattgtcccgtgtacgcaccgatttgccgctcgaagttgatttcggtcgccgccgcgaacctgactgggagggtcttaaagcgtttttagagcgtcttgaatttggttcgctcttgcatgaattcggccttttagaaagcccgttactggccgaagaagcaccttggccaccgcccgagggcgcgtttttaggttaccgtttgagtcgcccggaaccgatgtgggccgaattactggctcttgcagcgtctgcccagggacgtgtgtatcgcgcggaagaccctcatggtgcgctccgcggcctcttcgaagtccgtaccctccttgccaaagacttagctgttgttgcattgcgcgaaggtcttgatttacctccgactgatgatccaatgcttcttgcgtacctcttggacccgtcaaacacgacgcccgaaggcgtagcccgtcgttacggcggcgagtggtgggaagatgcaggcaaacgcgcgttattggccgaacgtttgcacgaaaatttattaggacgtttgcaaggcgaggaacgtctcctctggctttacgaagaagtggagaaaccattgagtcgcgtgctcgcgcatatggaagctaccggtgtcaaattagacgtggcgtatttggagaatctcagccttgaagttgctgcccacatgcgccgcttggaggaagaagtattccgtttagcaggccgttcctttcgccttaactctcgcgatcagttagaacgtgtgttgttcgatgaacttggtctccctcctatcggcaagacagagaagaccggtaaacgtagcacttcagcggcggttttagaagctcttcgcgaagtccatcccattgtggacaagatcttgcagtaccgcgaaatggcgaaattgaaaggcacctatattgaccgtcttccggcattagtccacccgaaaacgggacgcctccatacccgcttcaaccaaacagccacggcgaccggtcgtttgtcctcctctgatccaaaccttcagaatattccagtacgtaccccattgggccagaagatccgccgtgcgtttgtagctgaggagggttggcgtttagtggccctcgattatcgtcaaattgaattacgtgtccttgcccatctttctggcgatgagaacctcatccgcgtgtttcaggaaggcaaagacattcacactcaaacggcaagctggatgtttggattatcagctgaagcgatcgatcctttgatgcgtcgtgcagcgaagaccatcaatttcggtgttctctacggtatgagtgcctttcgtttgtcgcaggaattaggcattccctatgaagaagctcaggcgttcattcagaaatactttcaaagctatcccaaagttaaagcatggatcgagaagactctccgtgaaggccgcacacgtggttacgtagagaccttatttggacgtcgccgctatgttcccgatttaaacgctcgcgtgaaaggcaagcgtgaagccgccgaacgcatggcgttcaacatgcctgtacagggcacggcagctgacctcatgaaacttgcaatggtgcgcctttttccacaattgcgtgaagttggtgcccgcatgctcttgcaggtccacgatgaactcttgttagaagcgccaaaagagcgtgcggaagaggtggcagccctcgcgaaagaagttatggaaggcgtgtggcccttagcggtgcctcttgaagtcgaagttggtattggcgaggattggctggctgccaaagga

SEQ ID NO: 6094 - protein, 841 aa, synthetic construct
  REGION 1..841: note = Variant of DNA polymerase I from Thermus sp. strain 2.9
MHHHHHHGGSGVLPVFEPKGRVLLVDGHHLAYRNFFALKGLTTSLGEPVQGVYGFAKSLLKALKEDGDVVIVVFDAKAPSFRHEAYEAYKAGRAPTPEDFPRQLALMKELVDLLGLERLEVPGFEADDVLATLAKKAEREGYEVQILTADRDLFQLLSPRISVLHPEGHRITPEWLWEKYGLRPEQWVDFRALAGDPSDNIPGVKGIGEKTALKLLKEWGSLENLLKNLDQVKPESVREKILAHLEDLKLSRELSRVRTDLPLEVDFGRRREPDWEGLKAFLERLEFGSLLHEFGLLESPLLAEEAPWPPPEGAFLGYRLSRPEPMWAELLALAASAQGRVYRAEDPHGALRGLFEVRTLLAKDLAVVALREGLDLPPTDDPMLLAYLLDPSNTTPEGVARRYGGEWWEDAGKRALLAERLHENLLGRLQGEERLLWLYEEVEKPLSRVLAHMEATGVKLDVAYLENLSLEVAAHMRRLEEEVFRLAGRSFRLNSRDQLERVLFDELGLPPIGKTEKTGKRSTSAAVLEALREVHPIVDKILQYREMAKLKGTYIDRLPALVHPKTGRLHTRFNQTATATGRLSSSDPNLQNIPVRTPLGQKIRRAFVAEEGWRLVALDYRQIELRVLAHLSGDENLIRVFQEGKDIHTQTASWMFGLSAEAIDPLMRRAAKTINFGVLYGMSAFRLSQELGIPYEEAQAFIQKYFQSYPKVKAWIEKTLREGRTRGYVETLFGRRRYVPDLNARVKGKREAAERMAFNMPVQGTAADLMKLAMVRLFPQLREVGARMLLQVHDELLLEAPKERAEEVAALAKEVMEGVWPLAVPLEVEVGIGEDWLAAKG

SEQ ID NO: 6095 - DNA, 2523 bp, synthetic construct
  misc_feature 1..2523: note = Variant of DNA polymerase I from Thermus sp. strain 2.9
  source 1..2523: mol_type = other DNA
atgcaccatcatcatcatcatggcggtagcggcgtgttaccggtgttcgagcctaaaggtcgcgtgcttctggttgatggccatcatctcgcgtatcgtaacttctttgccctgaaaggattaaccaccagcctgggcgagccggtacagggtgtctacggctttgcaaagtcgctcctgaaagctctgaaagaagacggtgatgtggtgattgttgtctttgatgcgaaagcgccaagttttcgcaacgaagcgtacgaagcttacaaagccgggcgtgctccaacgccggaagactttcctcgccaattggcgcttatgaaggaattagtggatttgcttggcctcgaacgcttggaagttcccggtttcgaggcagacgacgtattagcgactctcgcaaagaaagccgaacgtgagggctatgaagtccagatcttgacagcagatcgcgatcttttccagcttttatctccgcgcatctcggtgttacacccggaagggcatcgtatcaccccggaatggctctgggagaaatatggtttgcgtcccgaacaatgggtggattttcgcgccttagcaggcgatccgagcgacaatattccgggagttaaaggtatcggcgagaagacggcgctcaagctccttaaagaatgggggtcgttggagaacttgcttaagaatttagatcaggtcaaaccagagtcagtgcgtgagaagattcttgctcacctcgaagacctcaaattaagccgcgaattgtcccgtgtacgcaccgatttgccgctcgaagttgatttcggtcgccgccgcgaacctgactgggagggtcttaaagcgtttttagagcgtcttgaatttggttcgctcttgcatgaattcggccttttagaaagcccgttactggccgaagaagcaccttggccaccgcccgagggcgcgtttttaggttaccgtttgagtcgcccggaaccgatgtgggccgaattactggctcttgcagcgtctgcccagggacgtgtgtatcgcgcggaagaccctcatggtgcgctccgcggcctcttcgaagtccgtggcctccttgccaaagacttagctgttgttgcattgcgcgaaggtcttgatttacctccgactgatgatccaatgcttcttgcgtacctcttggacccgtcaaacacgacgcccgaaggcgtagcccgtcgttacggcggcgagtggaccgaagatgcagcgaaacgcgcgttattggccgaacgtttgcacgaaaatttattaggacgtttgcaaggcgaggagcgtctcctgtggctttacgaagaagtggagaaaccattgagtcgcgtgctcgcgcatatggaagctaccggtgtcaaattagacgtggcgtatttggagaatctcagccttgaagttgctgcccacatgcgccgcttggaggaagaagtattccgtttagcaggccgttcctttcgccttaactctcgcgatcagttagaacgtgtgttgttcgatgaacttggtctccctcctatcggcaagacagagaagaccggtaaacgtagcacttcagcggcggttttagaagctcttcgcgaagtccatcccattgtggacaagatcttgcagtaccgcgaaatggcgaaattgaaaggcacctatattgaccgtcttccggcattagtccacccgaaaacgggacgcctccatacccgcttcaaccaaacagccacggcgaccggtcgtttgtcctcctctgatccaaaccttcagaatattccagtacgtaccccattgggccagaagatccgccgtgcgtttgtagctgaggagggttggcgtttagtggccctcgattatcgtcaaattgaattacgtgtccttgcccatctttctggcgatgagaacctcatccgcgtgtttcaggaaggcaaagacattcacactcaaacggcaagctggatgtttggattatcagctgaagcgatcgatcctttgatgcgtcgtgcagcgaagaccatcaatttcggtgttctctacggtatgagtgcctttcgtttgtcgcaggaattaggcattccctatgaagaagctcagggtttcattcagaaatactttcaaagctatcccaaagttaaagcatggatcgagaagactctccgtgaaggccgcacacgtggttacgtagagaccttatttggacgtcgccgctatgttcccgatttaaacggtcgcgtgaaaggcaagcgtgaagccgccgaacgcatggcgttcaacatgcctgtacagggcacggcagctgacctcatgaaacttgcaatggtgcgcctttttccacaattgcgtgaagttggtgcccgcatgctgttgcaggtccacgatgaactcttgttagaagcgccaaaagagcgtgcggaagaggtggcagccctcgcgaaagaagttatggaaggcgtgtggcccttagcggtgcctcttgaagtcgaagttggtattggcgaggattggctggctgccaaagga

SEQ ID NO: 6096 - protein, 841 aa, synthetic construct
  REGION 1..841: note = Variant of DNA polymerase I from Thermus sp. strain 2.9
MHHHHHHGGSGVLPVFEPKGRVLLVDGHHLAYRNFFALKGLTTSLGEPVQGVYGFAKSLLKALKEDGDVVIVVFDAKAPSFRNEAYEAYKAGRAPTPEDFPRQLALMKELVDLLGLERLEVPGFEADDVLATLAKKAEREGYEVQILTADRDLFQLLSPRISVLHPEGHRITPEWLWEKYGLRPEQWVDFRALAGDPSDNIPGVKGIGEKTALKLLKEWGSLENLLKNLDQVKPESVREKILAHLEDLKLSRELSRVRTDLPLEVDFGRRREPDWEGLKAFLERLEFGSLLHEFGLLESPLLAEEAPWPPPEGAFLGYRLSRPEPMWAELLALAASAQGRVYRAEDPHGALRGLFEVRGLLAKDLAVVALREGLDLPPTDDPMLLAYLLDPSNTTPEGVARRYGGEWTEDAAKRALLAERLHENLLGRLQGEERLLWLYEEVEKPLSRVLAHMEATGVKLDVAYLENLSLEVAAHMRRLEEEVFRLAGRSFRLNSRDQLERVLFDELGLPPIGKTEKTGKRSTSAAVLEALREVHPIVDKILQYREMAKLKGTYIDRLPALVHPKTGRLHTRFNQTATATGRLSSSDPNLQNIPVRTPLGQKIRRAFVAEEGWRLVALDYRQIELRVLAHLSGDENLIRVFQEGKDIHTQTASWMFGLSAEAIDPLMRRAAKTINFGVLYGMSAFRLSQELGIPYEEAQGFIQKYFQSYPKVKAWIEKTLREGRTRGYVETLFGRRRYVPDLNGRVKGKREAAERMAFNMPVQGTAADLMKLAMVRLFPQLREVGARMLLQVHDELLLEAPKERAEEVAALAKEVMEGVWPLAVPLEVEVGIGEDWLAAKG

SEQ ID NO: 6097 - DNA, 2523 bp, synthetic construct
  misc_feature 1..2523: note = Variant of DNA polymerase I from Thermus sp. strain 2.9
  source 1..2523: mol_type = other DNA
atgcaccatcatcatcatcatggcggtagcggcgtgttaccggtgttcgagcctaaaggtcgcgtgcttctggttgatggccatcatctcgcgtatcgtaacttctttgccctgaaaggattaaccaccagcctgggcgagccggtacagggtgtctacggctttgcaaagtcgctcctgaaagctctgaaagaagacggtgatgtggtgattgttgtctttgatgcgaaagcgccaagttttcgccacgaagcgtacgaagcttacaaagccgggcgtgctccaacgccggaagactttcctcgccaattggcgcttatgaaggaattagtggatttgcttggcctcgaacgcttggaagttcccggtttcgaggcagacgacgtattagcgactctcgcaaagaaagccgaacgtgagggctatgaagtccagatcttgacagcagatcgcgatcttttccagcttttatctccgcgcatctcggtgttacacccggaagggcatcgtatcaccccggaatggctctgggagaaatatggtttgcgtcccgaacaatgggtggattttcgcgccttagcaggcgatccgagcgacaatattccgggagttaaaggtatcggcgagaagacggcgctcaagctccttaaagaatgggggtcgttggagaacttgcttaagaatttagatcaggtcaaaccagagtcagtgcgtgagaagattcttgctcacctcgaagacctcaaattaagccgcgaattgtcccgtgtacgcaccgatttgccgctcgaagttgatttcggtcgccgccgcgaacctgactgggagggtcttaaagcgtttttagagcgtcttgaatttggttcgctcttgcatgaattcggccttttagaaagcccgttactggccgaagaagcaccttggccaccgcccgagggcgcgtttttaggttaccgtttgagtcgcccggaaccgatgtgggccgaattactggctcttgcagcgtctgcccagggacgtgtgtatcgcgcggaagaccctcatggtgcgctccgcggcctcttcgaagtccgtggactccttgccaaagacttagctgttgttgcattgcgcgaaggtcttgatttacctccgactgatgatccaatgcttcttgcgtacctcttggacccgtcaaacacgacgcccgaaggcgtagcccgtcgttacggcggcgagtggcaggaagatgcagcgaaacgcgcgttattggccgaacgtttgcacgaaaatttattaggacgtttgcaaggcgaggaacgtctcctctggctttacgaagaagtggagaaaccattgagtcgcgtgctcgcgcatatggaagctaccggtgtcaaattagacgtggcgtatttggagaatctcagccttgaagttgctgcccacatgcgccgcttggaggaagaagtattccgtttagcaggccgttcctttcgccttaactctcgcgatcagttagaacgtgtgttgttcgatgaacttggtctccctcctatcggcaagacagagaagaccggtaaacgtagcacttcagcggcggttttagaagctcttcgcgaagtccatcccattgtggacaagatcttgcagtaccgcgaaatggcgaaattgaaaggcacctatattgaccgtcttccggcattagtccacccgaaaacgggacgcctccatacccgcttcaaccaaacagccacggcgaccggtcgtttgtcctcctctgatccaaaccttcagaatattccagtacgtaccccattgggccagaagatccgccgtgcgtttgtagctgaggagggttggcgtttagtggccctcgattatcgtcaaattgaattacgtgtccttgcccatctttctggcgatgagaacctcatccgcgtgtttcaggaaggcaaagacattcacactcaaacggcaagctggatgtttggattatcagctgaagcgatcgatcctttgatgcgtcgtgcagcgaagaccatcaatttcggtgttctctacggtatgagtgcctttcgtttgtcgcaggaattaggcattccctatgaagaagctcaggcgttcattcagaaatactttcaaagctatcccaaagttaaagcatggatcgagaagactctccgtgaaggccgcacacgtggttacgtagagaccttatttggacgtcgccgctatgttcccgatttaaacgctcgcgtgaaaggcaagcgtgaagccgccgaacgcatggcgttcaacatgcctgtacagggcacggcagctgacctcatgaaacttgcaatggtgcgcctttttccacaattgcgtgaagttggtgcccgcatgctcttgcaggtccacgatgaactcttgttagaagcgccaaaagagcgtgcggaagaggtggcagccctcgcgaaagaagttatggaaggcgtgtggcccttagcggtgcctcttgaagtcgaagttggtattggcgaggattggctggctgccaaagga

SEQ ID NO: 6098 - protein, 841 aa, synthetic construct
  REGION 1..841: note = Variant of DNA polymerase I from Thermus sp. strain 2.9
MHHHHHHGGSGVLPVFEPKGRVLLVDGHHLAYRNFFALKGLTTSLGEPVQGVYGFAKSLLKALKEDGDVVIVVFDAKAPSFRHEAYEAYKAGRAPTPEDFPRQLALMKELVDLLGLERLEVPGFEADDVLATLAKKAEREGYEVQILTADRDLFQLLSPRISVLHPEGHRITPEWLWEKYGLRPEQWVDFRALAGDPSDNIPGVKGIGEKTALKLLKEWGSLENLLKNLDQVKPESVREKILAHLEDLKLSRELSRVRTDLPLEVDFGRRREPDWEGLKAFLERLEFGSLLHEFGLLESPLLAEEAPWPPPEGAFLGYRLSRPEPMWAELLALAASAQGRVYRAEDPHGALRGLFEVRGLLAKDLAVVALREGLDLPPTDDPMLLAYLLDPSNTTPEGVARRYGGEWQEDAAKRALLAERLHENLLGRLQGEERLLWLYEEVEKPLSRVLAHMEATGVKLDVAYLENLSLEVAAHMRRLEEEVFRLAGRSFRLNSRDQLERVLFDELGLPPIGKTEKTGKRSTSAAVLEALREVHPIVDKILQYREMAKLKGTYIDRLPALVHPKTGRLHTRFNQTATATGRLSSSDPNLQNIPVRTPLGQKIRRAFVAEEGWRLVALDYRQIELRVLAHLSGDENLIRVFQEGKDIHTQTASWMFGLSAEAIDPLMRRAAKTINFGVLYGMSAFRLSQELGIPYEEAQAFIQKYFQSYPKVKAWIEKTLREGRTRGYVETLFGRRRYVPDLNARVKGKREAAERMAFNMPVQGTAADLMKLAMVRLFPQLREVGARMLLQVHDELLLEAPKERAEEVAALAKEVMEGVWPLAVPLEVEVGIGEDWLAAKG

SEQ ID NO: 6099 - DNA, 2523 bp, synthetic construct
  misc_feature 1..2523: note = Variant of DNA polymerase I from Thermus sp. strain 2.9
  source 1..2523: mol_type = other DNA
atgcaccatcatcatcatcatggcggtagcggcgtgttaccggtgttcgagcctaaaggtcgcgtgcttctggttgatggccatcatctcgcgtatcgtaacttctttgccctgaaaggattaaccaccagcctgggcgagccggtacagggtgtctacggctttgcaaagtcgctcctgaaagctctgaaagaagacggtgatgtggtgattgttgtctttgatgcgaaagcgccaagttttcgccacgaagcgtacgaagcttacaaagccgggcgtgctccaacgccggaagactttcctcgccaattggcgcttatgaaggaattagtggatttgcttggcctcgaacgcttggaagttcccggtttcgaggcagacgacgtattagcgactctcgcaaagaaagccgaacgtgagggctatgaagtccagatcttgacagcagatcgcgatcttttccagcttttatctccgcgcatctcggtgttacacccggaagggcatcgtatcaccccggaatggctctgggagaaatatggtttgcgtcccgaacaatgggtggattttcgcgccttagcaggcgatccgagcgacaatattccgggagttaaaggtatcggcgagaagacggcgctcaagctccttaaagaatgggggtcgttggagaacttgcttaagaatttagatcaggtcaaaccagagtcagtgcgtgagaagattcttgctcacctcgaagacctcaaattaagccgcgaattgtcccgtgtacgcaccgatttgccgctcgaagttgatttcggtcgccgccgcgaacctgactgggagggtcttaaagcgtttttagagcgtcttgaatttggttcgctcttgcatgaattcggccttttagaaagcccgttactggccgaagaagcaccttggccaccgcccgagggcgcgtttttaggttaccgtttgagtcgcccggaaccgatgtgggccgaattactggctcttgcagcgtctgcccagggacgtgtgtatcgcgcggaagaccctcatggtgcgctccgcggcctcttcgaagtccgtggactccttgccaaagacttagctgttgttgcattgcgcgaaggtcttgatttacctccgactgatgatccaatgcttcttgcgtacctcttggacccgtcaaacacgacgcccgaaggcgtagcccgtcgttacggcggcgagtggaccgaagatgcagcgaaacgcgcgttattggccgaacgtttgcacgaaaatttattaggacgtttgcaaggcgaggaacgtctcctctggctttacgaagaagtggagaaaccattgagtcgcgtgctcgcgcatatggaagctaccggtgtcaaattagacgtggcgtatttggagaatctcagccttgaagttgctgcccacatgcgccgcttggaggaagaagtattccgtttagcaggccgttcctttcgccttaactctcgcgatcagttagaacgtgtgttgttcgatgaacttggtctccctcctatcggcaagacagagaagaccggtaaacgtagcacttcagcggcggttttagaagctcttcgcgaagtccatcccattgtggacaagatcttgcagtaccgcgaaatggcgaaattgaaaggcacctatattgaccgtcttccggcattagtccacccgaaaacgggacgcctccatacccgcttcaaccaaacagccacggcgaccggtcgtttgtcctcctctgatccaaaccttcagaatattccagtacgtaccccattgggccagaagatccgccgtgcgtttgtagctgaggagggttggcgtttagtggccctcgattatcgtcaaattgaattacgtgtccttgcccatctttctggcgatgagaacctcatccgcgtgtttcaggaaggcaaagacattcacactcaaacggcaagctggatgtttggattatcagctgaagcgatcgatcctttgatgcgtcgtgcagcgaagaccatcaatttcggtgttctctacggtatgagtgcctttcgtttgtcgctggaattaggcattccctatgaagaagctcaggcgttcattcagaaatactttcaaagctatcccaaagttaaagcatggatcgagaagactctccgtgaaggccgcacacgtggttacgtagagaccttatttggacgtcgccgctatgttcccgatttaaacgctcgcgtgaaaggcaagcgtgaagccgccgaacgcatggcgttcaacatgcctgtacagggcacggcagctgacctcatgaaacttgcaatggtgcgcctttttccacaattgcgtgaagttggtgcccgcatgctcttgcaggtccacgatgaactcttgttagaagcgccaaaagagcgtgcggaagaggtggcagccctcgcgaaagaagttatggaaggcgtgtggcccttagcggtgcctcttgaagtcgaagttggtattggcgaggattggctggctgccaaagga

SEQ ID NO: 6100 - protein, 841 aa, synthetic construct
  REGION 1..841: note = Variant of DNA polymerase I from Thermus sp. strain 2.9
MHHHHHHGGSGVLPVFEPKGRVLLVDGHHLAYRNFFALKGLTTSLGEPVQGVYGFAKSLLKALKEDGDVVIVVFDAKAPSFRHEAYEAYKAGRAPTPEDFPRQLALMKELVDLLGLERLEVPGFEADDVLATLAKKAEREGYEVQILTADRDLFQLLSPRISVLHPEGHRITPEWLWEKYGLRPEQWVDFRALAGDPSDNIPGVKGIGEKTALKLLKEWGSLENLLKNLDQVKPESVREKILAHLEDLKLSRELSRVRTDLPLEVDFGRRREPDWEGLKAFLERLEFGSLLHEFGLLESPLLAEEAPWPPPEGAFLGYRLSRPEPMWAELLALAASAQGRVYRAEDPHGALRGLFEVRGLLAKDLAVVALREGLDLPPTDDPMLLAYLLDPSNTTPEGVARRYGGEWTEDAAKRALLAERLHENLLGRLQGEERLLWLYEEVEKPLSRVLAHMEATGVKLDVAYLENLSLEVAAHMRRLEEEVFRLAGRSFRLNSRDQLERVLFDELGLPPIGKTEKTGKRSTSAAVLEALREVHPIVDKILQYREMAKLKGTYIDRLPALVHPKTGRLHTRFNQTATATGRLSSSDPNLQNIPVRTPLGQKIRRAFVAEEGWRLVALDYRQIELRVLAHLSGDENLIRVFQEGKDIHTQTASWMFGLSAEAIDPLMRRAAKTINFGVLYGMSAFRLSLELGIPYEEAQAFIQKYFQSYPKVKAWIEKTLREGRTRGYVETLFGRRRYVPDLNARVKGKREAAERMAFNMPVQGTAADLMKLAMVRLFPQLREVGARMLLQVHDELLLEAPKERAEEVAALAKEVMEGVWPLAVPLEVEVGIGEDWLAAKG

SEQ ID NO: 6101 - DNA, 2523 bp, synthetic construct
  misc_feature 1..2523: note = Variant of DNA polymerase I from Thermus sp. strain 2.9
  source 1..2523: mol_type = other DNA
atgcaccatcatcatcatcatggcggtagcggcgtgttaccggtgttcgagcctaaaggtcgcgtgcttctggttgatggccatcatctcgcgtatcgtaacttctttgccctgaaaggattaaccaccagcctgggcgagccggtacagggtgtctacggctttgcaaagtcgctcctgaaagctctgaaagaagacggtgatgtggtgattgttgtctttgatgcgaaagcgccaagttttcgccacgaagcgtacgaagcttacaaagccgggcgtgctccaacgccggaagactttcctcgccaattggcgcttatgaaggaattagtggatttgcttggcctcgaacgcttggaagttcccggtttcgaggcagacgacgtattagcgactctcgcaaagaaagccgaacgtgagggctatgaagtccagatcttgacagcagatcgcgatcttttccagcttttatctccgcgcatctcggtgttacacccggaagggcatcgtatcaccccggaatggctctgggagaaatatggtttgcgtcccgaacaatgggtggattttcgcgccttagcaggcgatccgagcgacaatattccgggagttaaaggtatcggcgagaagacggcgctcaagctccttaaagaatgggggtcgttggagaacttgcttaagaatttagatcaggtcaaaccagagtcagtgcgtgagaagattcttgctcacctcgaagacctcaaattaagccgcgaattgtcccgtgtacgcaccgatttgccgctcgaagttgatttcggtcgccgccgcgaacctgactgggagggtcttaaagcgtttttagagcgtcttgaatttggttcgctcttgcatgaattcggccttttagaaagcccgttactggccgaagaagcaccttggccaccgcccgagggcgcgtttttaggttaccgtttgagtcgcccggaaccgatgtgggccgaattactggctcttgcagcgtctgcccagggacgtgtgtatcgcgcggaagaccctcatggtgcgctccgcggcctcttcgaagtccgtggactccttgccaaagacttagctgttgttgcattgcgcgaaggtcttgatttacctccgactgatgatccaatgcttcttgcgtacctcttggacccgtcagggacgacgcccgaaggcgtagcccgtcgttacggcggcgagtggaccgaagatgcagcgaaacgcgcgttattggccgaacgtttgcacgaaaatttattaggacgtttgcaaggcgaggaacgtctcctctggctttacgaagaagtggagaaaccattgagtcgcgtgctcgcgcatatggaagctaccggtgtcaaattagacgtggcgtatttggagaatctcagccttgaagttgctgcccacatgcgccgcttggaggaagaagtattccgtttagcaggccgttcctttcgccttaactctcgcgatcagttagaacgtgtgttgttcgatgaacttggtctccctcctatcggcaagacagagaagaccggtaaacgtagcacttcagcggcggttttagaagctcttcgcgaagtccatcccattgtggacaagatcttgcagtaccgcgaaatggcgaaattgaaaggcacctatattgaccgtcttccggcattagtccacccgaaaacgggacgcctccatacccgcttcaaccaaacagccacggcgaccggtcgtttgtcctcctctgatccaaaccttcagaatattccagtacgtaccccattgggccagaagatccgccgtgcgtttgtagctgaggagggttggcgtttagtggccctcgattatcgtcaaattgaattacgtgtccttgcccatctttctggcgatgagaacctcatccgcgtgtttcaggaaggcaaagacattcacactcaaacggcaagctggatgtttggattatcagctgaagcgatcgatcctttgatgcgtcgtgcagcgaagaccatcaatttcggtgttctctacggtatgagtgcctttcgtttgtcgcaggaattaggcattccctatgaagaagctcaggcgttcattcagaaatactttcaaagctatcccaaagttaaagcatggatcgagaagactctccgtgaaggccgcacacgtggttacgtagagaccttatttggacgtcgccgctatgttcccgatttaaacgctcgcgtgaaaggcaagcgtgaagccgccgaacgcatggcgttcaacatgcctgtacagggcacggcagctgacctcatgaaacttgcaatggtgcgcctttttccacaattgcgtgaagttggtgcccgcatgctcttgcaggtccacgatgaactcttgttagaagcgccaaaagagcgtgcggaagaggtggcagccctcgcgaaagaagttatggaaggcgtgtggcccttagcggtgcctcttgaagtcgaagttggtattggcgaggattggctggctgccaaagga

SEQ ID NO: 6102 - protein, 841 aa, synthetic construct
  REGION 1..841: note = Variant of DNA polymerase I from Thermus sp. strain 2.9
MHHHHHHGGSGVLPVFEPKGRVLLVDGHHLAYRNFFALKGLTTSLGEPVQGVYGFAKSLLKALKEDGDVVIVVFDAKAPSFRHEAYEAYKAGRAPTPEDFPRQLALMKELVDLLGLERLEVPGFEADDVLATLAKKAEREGYEVQILTADRDLFQLLSPRISVLHPEGHRITPEWLWEKYGLRPEQWVDFRALAGDPSDNIPGVKGIGEKTALKLLKEWGSLENLLKNLDQVKPESVREKILAHLEDLKLSRELSRVRTDLPLEVDFGRRREPDWEGLKAFLERLEFGSLLHEFGLLESPLLAEEAPWPPPEGAFLGYRLSRPEPMWAELLALAASAQGRVYRAEDPHGALRGLFEVRGLLAKDLAVVALREGLDLPPTDDPMLLAYLLDPSGTTPEGVARRYGGEWTEDAAKRALLAERLHENLLGRLQGEERLLWLYEEVEKPLSRVLAHMEATGVKLDVAYLENLSLEVAAHMRRLEEEVFRLAGRSFRLNSRDQLERVLFDELGLPPIGKTEKTGKRSTSAAVLEALREVHPIVDKILQYREMAKLKGTYIDRLPALVHPKTGRLHTRFNQTATATGRLSSSDPNLQNIPVRTPLGQKIRRAFVAEEGWRLVALDYRQIELRVLAHLSGDENLIRVFQEGKDIHTQTASWMFGLSAEAIDPLMRRAAKTINFGVLYGMSAFRLSQELGIPYEEAQAFIQKYFQSYPKVKAWIEKTLREGRTRGYVETLFGRRRYVPDLNARVKGKREAAERMAFNMPVQGTAADLMKLAMVRLFPQLREVGARMLLQVHDELLLEAPKERAEEVAALAKEVMEGVWPLAVPLEVEVGIGEDWLAAKG

SEQ ID NO: 6103 - DNA, 2523 bp, synthetic construct
  misc_feature 1..2523: note = Variant of DNA polymerase I from Thermus sp. strain 2.9
  source 1..2523: mol_type = other DNA
atgcaccatcatcatcatcatggcggtagcggcgtgttaccggtgttcgagcctaaaggtcgcgtgcttctggttgatggccatcatctcgcgtatcgtaacttctttgccctgaaaggattaaccaccagcctgggcgagccggtacagggtgtctacggctttgcaaagtcgctcctgaaagctctgaaagaagacggtgatgtggtgattgttgtctttgatgcgaaagcgccaagttttcgccacgaagcgtacgaagcttacaaagccgggcgtgctccaacgccggaagactttcctcgccaattggcgcttatgaaggaattagtggatttgcttggcctcgaacgcttggaagttcccggtttcgaggcagacgacgtattagcgactctcgcaaagaaagccgaacgtgagggctatgaagtccagatcttgacagcagatcgcgatcttttccagcttttatctccgcgcatctcggtgttacacccggaagggcatcgtatcaccccggaatggctctgggagaaatatggtttgcgtcccgaacaatgggtggattttcgcgccttagcaggcgatccgagcgacaatattccgggagttaaaggtatcggcgagaagacggcgctcaagctccttaaagaatgggggtcgttggagaacttgcttaagaatttagatcaggtcaaaccagagtcagtgcgtgagaagattcttgctcacctcgaagacctcaaattaagccgcgaattgtcccgtgtacgcaccgatttgccgctcgaagttgatttcggtcgccgccgcgaacctgactgggagggtcttaaagcgtttttagagcgtcttgaatttggttcgctcttgcatgaattcggccttttagaaagcccgttactggccgaagaagcaccttggccaccgcccgagggcgcgtttttaggttaccgtttgagtcgcccggaaccgatgtgggccgaattactggctcttgcagcgtctgcccagggacgtgtgtatcgcgcggaagaccctcatggtgcgctccgcggcctcttcgaagtccgtggactccttgccaaagacttagctgttgttgcattgcgcgaaggtcttgatttacctccgactgatgatccaatgcttcttgcgtacctcttggacccgtcaaacacgacgcccgaaggcgtagcccgtcgttacggcggcgagtggaccgaagatgcagcgaaacgcgcgttattggccgaacgtttgcacgaaaatttattaggacgtttgcaaggcgaggaacgtctcctctggctttacgaagaagtggagaaaccattgagtcgcgtgctcgcgcatatggaagctaccggtgtcaaattagacgtggcgtatttggagaatctcagccttgaagttgctgcccacatgcgccgcttggaggaagaagtattccgtttagcaggccgttcctttcgccttaactctcgcgatcagttagaacgtgtgttgttcgatgaacttggtctccctcctatcggcaagacagagaagaccggtaaacgtagcacttcagcggcggttttagaagctcttcgcgaagtccatcccattgtggacaagatcttgcagtaccgcgaaatggcgaaattgaaaggcacctatattgaccgtcttccggcattagtccacccgaaaacgggacgcctccatacccgcttcaaccaaacagccacggcgaccggtcgtttgtcctcctctgatccaaaccttcagaatattccagtacgtaccccattgggccagaagatccgccgtgcgtttgtagctgaggagggttggcgtttagtgcggctcgattatcgtcaaattgaattacgtgtccttgcccatctttctggcgatgagaacctcatccgcgtgtttcaggaaggcaaagacattcacactcaaacggcaagctggatgtttggattatcagctgaagcgatcgatcctttgatgcgtcgtgcagcgaagaccatcaatttcggtgttctctacggtatgagtgcctttcgtttgtcgcaggaattaggcattccctatgaagaagctcaggcgttcattcagaaatactttcaaagctatcccaaagttaaagcatggatcgagaagactctccgtgaaggccgcacacgtggttacgtagagaccttatttggacgtcgccgctatgttcccgatttaaacgctcgcgtgaaaggcaagcgtgaagccgccgaacgcatggcgttcaacatgcctgtacagggcacggcagctgacctcatgaaacttgcaatggtgcgcctttttccacaattgcgtgaagttggtgcccgcatgctcttgcaggtccacgatgaactcttgttagaagcgccaaaagagcgtgcggaagaggtggcagccctcgcgaaagaagttatggaaggcgtgtggcccttagcggtgcctcttgaagtcgaagttggtattggcgaggattggctggctgccaaagga

SEQ ID NO: 6104 - protein, 841 aa, synthetic construct
  REGION 1..841: note = Variant of DNA polymerase I from Thermus sp. strain 2.9
MHHHHHHGGSGVLPVFEPKGRVLLVDGHHLAYRNFFALKGLTTSLGEPVQGVYGFAKSLLKALKEDGDVVIVVFDAKAPSFRHEAYEAYKAGRAPTPEDFPRQLALMKELVDLLGLERLEVPGFEADDVLATLAKKAEREGYEVQILTADRDLFQLLSPRISVLHPEGHRITPEWLWEKYGLRPEQWVDFRALAGDPSDNIPGVKGIGEKTALKLLKEWGSLENLLKNLDQVKPESVREKILAHLEDLKLSRELSRVRTDLPLEVDFGRRREPDWEGLKAFLERLEFGSLLHEFGLLESPLLAEEAPWPPPEGAFLGYRLSRPEPMWAELLALAASAQGRVYRAEDPHGALRGLFEVRGLLAKDLAVVALREGLDLPPTDDPMLLAYLLDPSNTTPEGVARRYGGEWTEDAAKRALLAERLHENLLGRLQGEERLLWLYEEVEKPLSRVLAHMEATGVKLDVAYLENLSLEVAAHMRRLEEEVFRLAGRSFRLNSRDQLERVLFDELGLPPIGKTEKTGKRSTSAAVLEALREVHPIVDKILQYREMAKLKGTYIDRLPALVHPKTGRLHTRFNQTATATGRLSSSDPNLQNIPVRTPLGQKIRRAFVAEEGWRLVRLDYRQIELRVLAHLSGDENLIRVFQEGKDIHTQTASWMFGLSAEAIDPLMRRAAKTINFGVLYGMSAFRLSQELGIPYEEAQAFIQKYFQSYPKVKAWIEKTLREGRTRGYVETLFGRRRYVPDLNARVKGKREAAERMAFNMPVQGTAADLMKLAMVRLFPQLREVGARMLLQVHDELLLEAPKERAEEVAALAKEVMEGVWPLAVPLEVEVGIGEDWLAAKG

SEQ ID NO: 6105 - DNA, 2523 bp, synthetic construct
  misc_feature 1..2523: note = Variant of DNA polymerase I from Thermus sp. strain 2.9
  source 1..2523: mol_type = other DNA
atgcaccatcatcatcatcatggcggtagcggcgtgttaccggtgttcgagcctaaaggtcgcgtgcttctggttgatggccatcatctcgcgtatcgtaacttctttgccctgaaaggattaaccaccagcctgggcgagccggtacagggtgtctacggctttgcaaagtcgctcctgaaagctctgaaagaagacggtgatgtggtgattgttgtctttgatgcgaaagcgccaagttttcgccacgaagcgtacgaagcttacaaagccgggcgtgctccaacgccggaagactttcctcgccaattggcgcttatgaaggaattagtggatttgcttggcctcgaacgcttggaagttcccggtttcgaggcagacgacgtattagcgactctcgcaaagaaagccgaacgtgagggctatgaagtccagatcttgacagcagatcgcgatcttttccagcttttatctccgcgcatctcggtgttacacccggaagggcatcgtatcaccccggaatggctctgggagaaatatggtttgcgtcccgaacaatgggtggattttcgcgccttagcaggcgatccgagcgacaatattccgggagttaaaggtatcggcgagaagacggcgctcaagctccttaaagaatgggggtcgttggagaacttgcttaagaatttagatcaggtcaaaccagagtcagtgcgtgagaagattcttgctcacctcgaagacctcaaattaagccgcgaattgtcccgtgtacgcaccgatttgccgctcgaagttgatttcggtcgccgccgcgaacctgactgggagggtcttaaagcgtttttagagcgtcttgaatttggttcgctcttgcatgaattcggccttttagaaagcccgttactggccgaagaagcaccttggccaccgcccgagggcgcgtttttaggttaccgtttgagtcgcccggaaccgatgtgggccgaattactggctcttgcagcgtctgcccagggacgtgtgtatcgcgcggaagaccctcatggtgcgctccgcggcctcttcgaagtccgtggactccttgccaaagacttagctgttgttgcattgcgcgaaggtcttgatttacctccgactgatgatccaatgcttcttgcgtacctcttggacccgtcaaacacgacgcccgaaggcgtagcccgtcgttacggcggcgagtggaccgaagatgcagcgaaacgcgcgttattggccgaacgtttgcacgaaaatttattaggacgtttgcaaggcgaggaacgtctcctctggctttacgaagaagtggagaaaccattgagtcgcgtgctcgcgcatatggaagctaccggtgtcaaattagacgtggcgtatttggagaatctcagccttgaagttgctgcccacatgcgccgcttggaggaagaagtattccgtttagcaggccgttcctttcgccttaactctcgcgatcagttagaacgtgtgttgttcgatgaacttggtctccctcctatcggcaagacagagaagaccggtaaacgtagcacttcagcggcggttttagaagctcttcgcgaagtccatcccattgtggacaagatcttgcagtaccgcgaaatggcgaaattgaaaggcacctatattgaccgtcttccggcattagtccacccgaaaacgggacgcctccatacccgcttcaaccaaacagccacggcgaccggtcgtttgtcctcctctgatccaaaccttcagaatattccagtacgtaccccattgggccagaagatccgccgtgcgtttgtagctgagattggttggcgtttagtggccctcgattatcgtcaaattgaattacgtgtccttgcccatctttctggcgatgagaacctcatccgcgtgtttcaggaaggcaaagacattcacactcaaacggcaagctggatgtttggattatcagctgaagcgatcgatcctttgatgcgtcgtgcagcgaagaccatcaatttcggtgttctctacggtatgagtgcctttcgtttgtcgcaggaattaggcattccctatgaagaagctcaggcgttcattcagaaatactttcaaagctatcccaaagttaaagcatggatcgagaagactctccgtgaaggccgcacacgtggttacgtagagaccttatttggacgtcgccgctatgttcccgatttaaacgctcgcgtgaaaggcaagcgtgaagccgccgaacgcatggcgttcaacatgcctgtacagggcacggcagctgacctcatgaaacttgcaatggtgcgcctttttccacaattgcgtgaagttggtgcccgcatgctcttgcaggtccacgatgaactcttgttagaagcgccaaaagagcgtgcggaagaggtggcagccctcgcgaaagaagttatggaaggcgtgtggcccttagcggtgcctcttgaagtcgaagttggtattggcgaggattggctggctgccaaagga

SEQ ID NO: 6106 - protein, 841 aa, synthetic construct
  REGION 1..841: note = Variant of DNA polymerase I from Thermus sp. strain 2.9
MHHHHHHGGSGVLPVFEPKGRVLLVDGHHLAYRNFFALKGLTTSLGEPVQGVYGFAKSLLKALKEDGDVVIVVFDAKAPSFRHEAYEAYKAGRAPTPEDFPRQLALMKELVDLLGLERLEVPGFEADDVLATLAKKAEREGYEVQILTADRDLFQLLSPRISVLHPEGHRITPEWLWEKYGLRPEQWVDFRALAGDPSDNIPGVKGIGEKTALKLLKEWGSLENLLKNLDQVKPESVREKILAHLEDLKLSRELSRVRTDLPLEVDFGRRREPDWEGLKAFLERLEFGSLLHEFGLLESPLLAEEAPWPPPEGAFLGYRLSRPEPMWAELLALAASAQGRVYRAEDPHGALRGLFEVRGLLAKDLAVVALREGLDLPPTDDPMLLAYLLDPSNTTPEGVARRYGGEWTEDAAKRALLAERLHENLLGRLQGEERLLWLYEEVEKPLSRVLAHMEATGVKLDVAYLENLSLEVAAHMRRLEEEVFRLAGRSFRLNSRDQLERVLFDELGLPPIGKTEKTGKRSTSAAVLEALREVHPIVDKILQYREMAKLKGTYIDRLPALVHPKTGRLHTRFNQTATATGRLSSSDPNLQNIPVRTPLGQKIRRAFVAEIGWRLVALDYRQIELRVLAHLSGDENLIRVFQEGKDIHTQTASWMFGLSAEAIDPLMRRAAKTINFGVLYGMSAFRLSQELGIPYEEAQAFIQKYFQSYPKVKAWIEKTLREGRTRGYVETLFGRRRYVPDLNARVKGKREAAERMAFNMPVQGTAADLMKLAMVRLFPQLREVGARMLLQVHDELLLEAPKERAEEVAALAKEVMEGVWPLAVPLEVEVGIGEDWLAAKG

SEQ ID NO: 6107 - DNA, 2523 bp, synthetic construct
  misc_feature 1..2523: note = Variant of DNA polymerase I from Thermus sp. strain 2.9
  source 1..2523: mol_type = other DNA
atgcaccatcatcatcatcatggcggtagcggcgtgttaccggtgttcgagcctaaaggtcgcgtgcttctggttgatggccatcatctcgcgtatcgtaacttctttgccctgaaaggattaaccaccagcctgggcgagccggtacagggtgtctacggctttgcaaagtcgctcctgaaagctctgaaagaagacggtgatgtggtgattgttgtctttgatgcgaaagcgccaagttttcgccacgaagcgtacgaagcttacaaagccgggcgtgctccaacgccggaagactttcctcgccaattggcgcttatgaaggaattagtggatttgcttggcctcgaacgcttggaagttcccggtttcgaggcagacgacgtattagcgactctcgcaaagaaagccgaacgtgagggctatgaagtccagatcttgacagcagatcgcgatcttttccagcttttatctccgcgcatctcggtgttacacccggaagggcatcgtatcaccccggaatggctctgggagaaatatggtttgcgtcccgaacaatgggtggattttcgcgccttagcaggcgatccgagcgacaatattccgggagttaaaggtatcggcgagaagacggcgctcaagctccttaaagaatgggggtcgttggagaacttgcttaagaatttagatcaggtcaaaccagagtcagtgcgtgagaagattcttgctcacctcgaagacctcaaattaagccgcgaattgtcccgtgtacgcaccgatttgccgctcgaagttgatttcggtcgccgccgcgaacctgactgggagggtcttaaagcgtttttagagcgtcttgaatttggttcgctcttgcatgaattcggccttttagaaagcccgttactggccgaagaagcaccttggccaccgcccgagggcgcgtttttaggttaccgtttgagtcgcccggaaccgatgtgggccgaattactggctcttgcagcgtctgcccagggacgtgtgtatcgcgcggaagaccctcatggtgcgctccgcggcctcttcgaagtccgtggactccttgccaaagacttagctgttgttgcattgcgcgaaggtcttgatttacctccgactgatgatccaatgcttcttgcgtacctcttggacccgtcaaacacgacgcccgaaggcgtagcccgtcgttacggcggcgagtggaccgaagatgcagcgaaacgcgcgttattggccgaacgtttgcacgaaaatttattaggacgtttgcaaggcgaggaacgtctcctctggctttacgaagaagtggagaaaccattgagtcgcgtgctcgcgcatatggaagctaccggtgtcaaattagacgtggcgtatttggagaatctcagccttgaagttgctgcccacatgcgccgcttggaggaagaagtattccgtttagggggccgttcctttcgccttaactctcgcgatcagttagaacgtgtgttgttcgatgaacttggtctccctcctatcggcaagacagagaagaccggtaaacgtagcacttcagcggcggttttagaagctcttcgcgaagtccatcccattgtggacaagatcttgcagtaccgcgaaatggcgaaattgaaaggcacctatattgaccgtcttccggcattagtccacccgaaaacgggacgcctccatacccgcttcaaccaaacagccacggcgaccggtcgtttgtcctcctctgatccaaaccttcagaatattccagtacgtaccccattgggccagaagatccgccgtgcgtttgtagctgaggagggttggcgtttagtggccctcgattatcgtcaaattgaattacgtgtccttgcccatctttctggcgatgagaacctcatccgcgtgtttcaggaaggcaaagacattcacactcaaacggcaagctggatgtttggattatcagctgaagcgatcgatcctttgatgcgtcgtgcagcgaagaccatcaatttcggtgttctctacggtatgagtgcctttcgtttgtcgcaggaattaggcattccctatgaagaagctcaggcgttcattcagaaatactttcaaagctatcccaaagttaaagcatggatcgagaagactctccgtgaaggccgcacacgtggttacgtagagaccttatttggacgtcgccgctatgttcccgatttaaacgctcgcgtgaaaggcaagcgtgaagccgccgaacgcatggcgttcaacatgcctgtacagggcacggcagctgacctcatgaaacttgcaatggtgcgcctttttccacaattgcgtgaagttggtgcccgcatgctcttgcaggtccacgatgaactcttgttagaagcgccaaaagagcgtgcggaagaggtggcagccctcgcgaaagaagttatggaaggcgtgtggcccttagcggtgcctcttgaagtcgaagttggtattggcgaggattggctggctgccaaagga

SEQ ID NO: 6108 - protein, 841 aa, synthetic construct
  REGION 1..841: note = Variant of DNA polymerase I from Thermus sp. strain 2.9
MHHHHHHGGSGVLPVFEPKGRVLLVDGHHLAYRNFFALKGLTTSLGEPVQGVYGFAKSLLKALKEDGDVVIVVFDAKAPSFRHEAYEAYKAGRAPTPEDFPRQLALMKELVDLLGLERLEVPGFEADDVLATLAKKAEREGYEVQILTADRDLFQLLSPRISVLHPEGHRITPEWLWEKYGLRPEQWVDFRALAGDPSDNIPGVKGIGEKTALKLLKEWGSLENLLKNLDQVKPESVREKILAHLEDLKLSRELSRVRTDLPLEVDFGRRREPDWEGLKAFLERLEFGSLLHEFGLLESPLLAEEAPWPPPEGAFLGYRLSRPEPMWAELLALAASAQGRVYRAEDPHGALRGLFEVRGLLAKDLAVVALREGLDLPPTDDPMLLAYLLDPSNTTPEGVARRYGGEWTEDAAKRALLAERLHENLLGRLQGEERLLWLYEEVEKPLSRVLAHMEATGVKLDVAYLENLSLEVAAHMRRLEEEVFRLGGRSFRLNSRDQLERVLFDELGLPPIGKTEKTGKRSTSAAVLEALREVHPIVDKILQYREMAKLKGTYIDRLPALVHPKTGRLHTRFNQTATATGRLSSSDPNLQNIPVRTPLGQKIRRAFVAEEGWRLVALDYRQIELRVLAHLSGDENLIRVFQEGKDIHTQTASWMFGLSAEAIDPLMRRAAKTINFGVLYGMSAFRLSQELGIPYEEAQAFIQKYFQSYPKVKAWIEKTLREGRTRGYVETLFGRRRYVPDLNARVKGKREAAERMAFNMPVQGTAADLMKLAMVRLFPQLREVGARMLLQVHDELLLEAPKERAEEVAALAKEVMEGVWPLAVPLEVEVGIGEDWLAAKG

SEQ ID NO: 6109 - DNA, 2523 bp, synthetic construct
  misc_feature 1..2523: note = Variant of DNA polymerase I from Thermus sp. strain 2.9
  source 1..2523: mol_type = other DNA
atgcaccatcatcatcatcatggcggtagcggcgtgttaccggtgttcgagcctaaaggtcgcgtgcttctggttgatggccatcatctcgcgtatcgtaacttctttgccctgaaaggattaaccaccagccgcggcgagccggtacagggtgtctacggctttgcaaagtcgctcctgaaagctctgaaagaagacggtgatgtggtgattgttgtctttgatgcgaaagcgccaagttttcgccacgaagcgtacgaagcttacaaagccgggcgtgctccaacgccggaagactttcctcgccaattggcgcttatgaaggaattagtggatttgcttggcctcgaacgcttggaagttcccggtttcgaggcagacgacgtattagcgactctcgcaaagaaagccgaacgtgagggctatgaagtccagatcttgacagcagatcgcgatcttttccagcttttatctccgcgcatctcggtgttacacccggaagggcatcgtatcaccccggaatggctctgggagaaatatggtttgcgtcccgaacaatgggtggattttcgcgccttagcaggcgatccgagcgacaatattccgggagttaaaggtatcggcgagaagacggcgctcaagctccttaaagaatgggggtcgttggagaacttgcttaagaatttagatcaggtcaaaccagagtcagtgcgtgagaagattcttgctcacctcgaagacctcaaattaagccgcgaattgtcccgtgtacgcaccgatttgccgctcgaagttgatttccgccgccgccgcgaacctgactgggagggtcttaaagcgtttttagagcgtcttgaatttggttcgctcttgcatgaattcggccttttagaaagcccgttactggccgaagaagcaccttggccaccgcccgagggcgcgtttttaggttaccgtttgagtcgcccggaaccgatgtgggccgaattactggctcttgcagcgtctgcccagggacgtgtgtatcgcgcggaagaccctcatggtgcgctccgcggcctcttcgaagtccgtggactccttgccaaagacttagctgttgttgcattgcgcgaaggtcttgatttacctccgactgatgatccaatgcttcttgcgtacctcttggacccgtcaaacacgacgcccgaaggcgtagcccgtcgttacggcggcgagtggaccgaagatgcagcgaaacgcgcgttattggccgaacgtttgcacgcaaatttattaggacgtttgcaaggcgaggaacgtctcctctggctttacgaagaagtggagaaaccattgagtcgcgtgctcgcgcatatggaagctaccggtgtcaaattagacgtggcgtatttggagaatctcagccttgaagttgctgccgaaatgcgccgcttggaggaagaagtattccgtttagcaggccgttcctttcgccttaactctcgcgatcagttagaacgtgtgttgttcgatgaacttggtctccctcctatcggcaagacagagaagaccggtaaacgtagcacttcagcggcggttttagaagctcttcgcgaagtccatcccattgtggacaagatcttgcagtaccgcgaactggcgaaattgaaaggcacctatattgaccgtcttccggcattagtccacccgaaaacgggacgcctccatacccgcttcaaccaaacagccacggcgaccggtcgtttgtccagttctgatccaaaccttcagaatattccagtacgtaccccattgggccagaagatccgccgtgcgtttgtagctgaggagggttggcgtttagtggccctcgattatcgtcaaattgaattacgtgtccttgcccatctttctggcgatgagaacctcatccgcgtgtttcaggaaggcaaagacattcacactcaaacggcaagctggatgtttggattatcagctgaagcgatcgatcctttgatgcgtcgtgcagcgaagaccatcaatttcggtgttctctacggtatgagtgcctttcgtttgtcgcaggaattaggcattccctatgaagaagctcaggcgttcattcagaaatactttcaaagctatcccaaagttaaagcatggatcgagaagactctcgaggaaggccgcacacgtggttacgtagagaccttatttggacgtcgccgctatgttcccgatttaaacgctcgcgtgaaaggcgtacgtgaagccgccgaacgcatggcgttcaacatgcctgtacagggcacggcagctgacctcatgaaacttgcaatggtgcgcctttttccacaattgcgtgaagttggtgcccgcatgctcttgcaggtccacgatgaactcttgttagaagcgccaaaagagcgtgcggaagaggtggcagccctcgcgaaagaagttatggaaggcgtgtggcccttagcggtgcctcttgaagtcgaagttggtattggcgaggattggctggctgccaaagga

SEQ ID NO: 6110 - protein, 841 aa, synthetic construct
  REGION 1..841: note = Variant of DNA polymerase I from Thermus sp. strain 2.9
MHHHHHHGGSGVLPVFEPKGRVLLVDGHHLAYRNFFALKGLTTSRGEPVQGVYGFAKSLLKALKEDGDVVIVVFDAKAPSFRHEAYEAYKAGRAPTPEDFPRQLALMKELVDLLGLERLEVPGFEADDVLATLAKKAEREGYEVQILTADRDLFQLLSPRISVLHPEGHRITPEWLWEKYGLRPEQWVDFRALAGDPSDNIPGVKGIGEKTALKLLKEWGSLENLLKNLDQVKPESVREKILAHLEDLKLSRELSRVRTDLPLEVDFRRRREPDWEGLKAFLERLEFGSLLHEFGLLESPLLAEEAPWPPPEGAFLGYRLSRPEPMWAELLALAASAQGRVYRAEDPHGALRGLFEVRGLLAKDLAVVALREGLDLPPTDDPMLLAYLLDPSNTTPEGVARRYGGEWTEDAAKRALLAERLHANLLGRLQGEERLLWLYEEVEKPLSRVLAHMEATGVKLDVAYLENLSLEVAAEMRRLEEEVFRLAGRSFRLNSRDQLERVLFDELGLPPIGKTEKTGKRSTSAAVLEALREVHPIVDKILQYRELAKLKGTYIDRLPALVHPKTGRLHTRFNQTATATGRLSSSDPNLQNIPVRTPLGQKIRRAFVAEEGWRLVALDYRQIELRVLAHLSGDENLIRVFQEGKDIHTQTASWMFGLSAEAIDPLMRRAAKTINFGVLYGMSAFRLSQELGIPYEEAQAFIQKYFQSYPKVKAWIEKTLEEGRTRGYVETLFGRRRYVPDLNARVKGVREAAERMAFNMPVQGTAADLMKLAMVRLFPQLREVGARMLLQVHDELLLEAPKERAEEVAALAKEVMEGVWPLAVPLEVEVGIGEDWLAAKG

SEQ ID NO: 6111 - DNA, 2523 bp, synthetic construct
  misc_feature 1..2523: note = Variant of DNA polymerase I from Thermus sp. strain 2.9
  source 1..2523: mol_type = other DNA
atgcaccatcatcatcatcatggcggtagcggcgtgttaccggtgttcgagcctaaaggtcgcgtgcttctggttgatggccatcatctcgcgtatcgtaacttctttgccctgaaaggattaaccaccagcctgggcgagccggtacagggtgtctacggctttgcaaagtcgctcctgaaagctctgaaagaagacggtgatgtggtgattgttgtctttgatgcgaaagcgccaagttttcgccacgaagcgtacgaagcttacaaagccgggcgtgctccaacgccggaagactttcctcgccaattggcgcttatgaaggaattagtggatttgcttggcctcgaacgcttggaagttcccggtttcgaggcagacgacgtattagcgactctcgcaaagaaagccgaacgtgagggctatgaagtccagatcttgacagcagatcgcgatcttttccagcttttatctccgcgcatctcggtgttacacccggaagggcatcgtatcaccccggaatggctctgggagaaatatggtttgcgtcccgaacaatgggtggattttcgcgccttagcaggcgatccgagcgacaatattccgggagttaaaggtatcggcgagaagacggcgctcaagctccttaaagaatgggggtcgttggagaacttgcttaagaatttagatcaggtcaaaccagagtcagtgcgtgagaagattcttgctcacctcgaagacctcaaattaagccgcgaattgtcccgtgtacgcaccgatttgccgctcgaagttgatttcggccgccgccgcgaacctgactgggagggtcttaaagcgtttttagagcgtcttgaatttggttcgctcttgcatgaattcggccttttagaaagcccgttactggccgaagaagcaccttggccaccgcccgagggcgcgtttttaggttaccgtttgagtcgcccggaaccgatgtgggccgaattactggctcttgcagcgtctgcccagggacgtgtgtatcgcgcggaagaccctcatggtgcgctccgcggcctcttcgaagtccgtggactccttgccaaagacttagctgttgttgcattgcgcgaaggtcttgatttacctccgactgatgatccaatgcttcttgcgtacctcttggacccgtcaaacacgacgcccgaaggcgtagcccgtcgttacggcggcgagtggaccgaagatgcagcgaaacgcgcgttattggccgaacgtttgcacgcaaatttattaggacgtttgcaaggcgaggaacgtctcctctggctttacgaagaagtggagaaaccattgagtcgcgtgctcgcgcatatggaagctaccggtgtcaaattagacgtggcgtatttggagaatcttcaccttgaagttgctgcccacatgcgccgcttggaggaagaagtattccgtttagcaggccgttcctttcgccttaactctcgcgatcagttagaacgtgtgttgttcgatgaacttggtctccctcctatcggcaagacagagaagaccggtaaacgtagcacttcagcggcggttttagaagctcttcgcgaagtccatcccattgtggacaagatcttgcagtaccgcgaaatggcgaaattgaaaggcacctatattgaccgtcttccggcattagtccacccgaaaacgggacgcctccatacccgcttcaaccaaacagccacggcgaccggtcgtttgtcctcctctgatccaaaccttcagaatattccagtacgtaccccattgggccagaagatccgccgtgcgtttgtagctgaggagggttggcgtttagtggccctcgattatcgtcaaattgaattacgtgtccttgcccatctttctggcgatgagaacctcatccgcgtgtttcaggaaggcaaagacattcacactcaaacggcaagctggatgtttggattatcagctgaagcgatcgatcctttgatgcgtcgtgcagcgaagaccatcaatttcggtgttctctacggtatgagtgcctttcgtttgtcgcaggaattaggcattccctatgaagaagctcaggcgttcattcagaaatactttcaaagctatcccaaagttaaagcatggatcgagaagactctcgaggaaggccgcacacgtggttacgtagagaccttatttggacgtcgccgctatgttcccgatttaaacgctcgcgtgaaaggcaagcgtgaagccgccgaacgcatggcgttcaacatgcctgtacagggcacggcagctgacctcatgaaacttgcaatggtgcgcctttttccacaattgcgtgaagttggtgcccgcatgctcttgcaggtccacgatgaactcttgttagaagcgccaaaagagcgtgcggaagaggtggcagccctcgcgaaagaagttatggaaggcgtgtggcccttagcggtgcctcttgaagtcgaagttggtattggcgaggattggctggctgccaaagga

SEQ ID NO: 6112 - protein, 841 aa, synthetic construct
  REGION 1..841: note = Variant of DNA polymerase I from Thermus sp. strain 2.9
MHHHHHHGGSGVLPVFEPKGRVLLVDGHHLAYRNFFALKGLTTSLGEPVQGVYGFAKSLLKALKEDGDVVIVVFDAKAPSFRHEAYEAYKAGRAPTPEDFPRQLALMKELVDLLGLERLEVPGFEADDVLATLAKKAEREGYEVQILTADRDLFQLLSPRISVLHPEGHRITPEWLWEKYGLRPEQWVDFRALAGDPSDNIPGVKGIGEKTALKLLKEWGSLENLLKNLDQVKPESVREKILAHLEDLKLSRELSRVRTDLPLEVDFGRRREPDWEGLKAFLERLEFGSLLHEFGLLESPLLAEEAPWPPPEGAFLGYRLSRPEPMWAELLALAASAQGRVYRAEDPHGALRGLFEVRGLLAKDLAVVALREGLDLPPTDDPMLLAYLLDPSNTTPEGVARRYGGEWTEDAAKRALLAERLHANLLGRLQGEERLLWLYEEVEKPLSRVLAHMEATGVKLDVAYLENLHLEVAAHMRRLEEEVFRLAGRSFRLNSRDQLERVLFDELGLPPIGKTEKTGKRSTSAAVLEALREVHPIVDKILQYREMAKLKGTYIDRLPALVHPKTGRLHTRFNQTATATGRLSSSDPNLQNIPVRTPLGQKIRRAFVAEEGWRLVALDYRQIELRVLAHLSGDENLIRVFQEGKDIHTQTASWMFGLSAEAIDPLMRRAAKTINFGVLYGMSAFRLSQELGIPYEEAQAFIQKYFQSYPKVKAWIEKTLEEGRTRGYVETLFGRRRYVPDLNARVKGKREAAERMAFNMPVQGTAADLMKLAMVRLFPQLREVGARMLLQVHDELLLEAPKERAEEVAALAKEVMEGVWPLAVPLEVEVGIGEDWLAAKG

SEQ ID NO: 6113 - DNA, 2523 bp, synthetic construct
  misc_feature 1..2523: note = Variant of DNA polymerase I from Thermus sp. strain 2.9
  source 1..2523: mol_type = other DNA
atgcaccatcatcatcatcatggcggtagcggcgtgttaccggtgttcgagcctaaaggtcgcgtgcttctggttgatggccatcatctcgcgtatcgtaacttctttgccctgaaaggattaaccaccagcctgggcgagccggtacagggtgtctacggctttgcaaagtcgctcctgaaagctctgaaagaagacggtgatgtggtgattgttgtctttgatgcgaaagcgccaagttttcgccacgaagcgtacgaagcttacaaagccgggcgtgctccaacgccggaagactttcctcgccaattggcgcttatgaaggaattagtggatttgcttggcctcgaacgcttggaagttcccggtttcgaggcagacgacgtattagcgactctcgcaaagaaagccgaacgtgagggctatgaagtccagatcttgacagcagatcgcgatcttttccagcttttatctccgcgcatctcggtgttacacccggaagggcatcgtatcaccccggaatggctctgggagaaatatggtttgcgtcccgaacaatgggtggattttcgcgccttagcaggcgatccgagcgacaatattccgggagttaaaggtatcggcgagaagacggcgctcaagctccttaaagaatgggggtcgttggagaacttgcttaagaatttagatcaggtcaaaccagagtcagtgcgtgagaagattcttgctcacctcgaagacctcaaattaagccgcgaattgtcccgtgtacgcaccgatttgccgctcgaagttgatttcggccgccgccgcgaacctgactgggagggtcttaaagcgtttttagagcgtcttgaatttggttcgctcttgcatgaattcggccttttagaaagcccgttaccggccgaagaagcaccttggccaccgcccgagggcgcgtttttaggttaccgtttgagtcgcccggaaccgatgtgggccgaattactggctcttgcagcgtctgcccagggacgtgtgtatcgcgcggaagaccctcatggtgcgctccgcggcctcttcgaagtccgtggactccttgccaaagacttagctgttgttgcattgcgcgaaggtcttgatttacctccgactgatgatccaatgcttcttgcgtacctcttggacccgtcaaacacgacgcccgaaggcgtagcccgtcgttacggcggcgagtggaccgaagatgcagcgaaacgcgcgttattggccgaacgtttgcacgaaaatttattaggacgtttgcaaggcgaggaacgtctcctctggctttacgaagaagtggagaaaccattgagtcgcgtgctcgcgcatatggaagctaccggtgtcaaattagacgtggcgtatttggagaatcttagccttgaagttgctgcccatatgcgccgcttggaggaagaagtattccgtttagcaggccgctcctttcgccttaactctcgcgatcagttagaacgtgtgttgttcgatgaacttggtctccctcctatcggcaagacagagaagaccggtaaacgtagcacttcagcggcggttttagaagctcttcgcgaagtccatcccattgtggacaagatcttgcagtaccgcgaaatggcgaaattgaaaggcacctatattgaccctcttccggcattagtccacccgaaaacgggacgcctccatacccgcttcaaccaaacagccacggcgaccggtcgtttgtccagttctgatccaaaccttcagaatattccagtacgtaccccattgggccagaagatccgccgtgcgtttgtagctgaggagggttggcgtttagtggccctcgattatcgtcaaattgaattacgtgtccttgcccatctttctggcgatgagaacctcatccgcgtgtttcaggaaggcaaagacattcacactcaaacggcaagctggatgtttggattatcagctgaagcgatcgatcctttgatgcgtcgtgcagcgaagaccatcaatttcggtgttctctacggtatgagtgcctttcgtttgtcgcaggaattaggcattccctatgaagaagctcaggcgttcattcagaaatactttcaaagctatcccaaagttaaagcatggatcgagaagactctcgaggaaggccgcacacgtggttacgtagagaccttatttggacgtcgccgctatgttcccgatttaaacgctcgcgtgaaaggcaaacgtgaagccgccgaacgcatggcgttcaacatgcctgtacagggcacggcagctgacctcatgaaacttgcaatggtgcgcctttttccacaattgcgtgaagttggtgcccgcatgctcttgcaggtccacgatgaactcttgttagaagcgccaaaagagcgtgcggaagaggtggcagccctcgcgaaagaagttatggaaggcgtgtggcccttagcggtgcctcttgaagtcgaagttggtattggcgaggattggctggctgccaaagga

SEQ ID NO: 6114 - protein, 841 aa, synthetic construct
  REGION 1..841: note = Variant of DNA polymerase I from Thermus sp. strain 2.9
MHHHHHHGGSGVLPVFEPKGRVLLVDGHHLAYRNFFALKGLTTSLGEPVQGVYGFAKSLLKALKEDGDVVIVVFDAKAPSFRHEAYEAYKAGRAPTPEDFPRQLALMKELVDLLGLERLEVPGFEADDVLATLAKKAEREGYEVQILTADRDLFQLLSPRISVLHPEGHRITPEWLWEKYGLRPEQWVDFRALAGDPSDNIPGVKGIGEKTALKLLKEWGSLENLLKNLDQVKPESVREKILAHLEDLKLSRELSRVRTDLPLEVDFGRRREPDWEGLKAFLERLEFGSLLHEFGLLESPLPAEEAPWPPPEGAFLGYRLSRPEPMWAELLALAASAQGRVYRAEDPHGALRGLFEVRGLLAKDLAVVALREGLDLPPTDDPMLLAYLLDPSNTTPEGVARRYGGEWTEDAAKRALLAERLHENLLGRLQGEERLLWLYEEVEKPLSRVLAHMEATGVKLDVAYLENLSLEVAAHMRRLEEEVFRLAGRSFRLNSRDQLERVLFDELGLPPIGKTEKTGKRSTSAAVLEALREVHPIVDKILQYREMAKLKGTYIDPLPALVHPKTGRLHTRFNQTATATGRLSSSDPNLQNIPVRTPLGQKIRRAFVAEEGWRLVALDYRQIELRVLAHLSGDENLIRVFQEGKDIHTQTASWMFGLSAEAIDPLMRRAAKTINFGVLYGMSAFRLSQELGIPYEEAQAFIQKYFQSYPKVKAWIEKTLEEGRTRGYVETLFGRRRYVPDLNARVKGKREAAERMAFNMPVQGTAADLMKLAMVRLFPQLREVGARMLLQVHDELLLEAPKERAEEVAALAKEVMEGVWPLAVPLEVEVGIGEDWLAAKG

SEQ ID NO: 6115 - DNA, 2523 bp, synthetic construct
  misc_feature 1..2523: note = Variant of DNA polymerase I from Thermus sp. strain 2.9
  source 1..2523: mol_type = other DNA
atgcaccatcatcatcatcatggcggtagcggcgtgttaccggtgttcgagcctaaaggtcgcgtgcttctggttgatggccatcatctcgcgtatcgtaacttctttgccctgaaaggattaaccaccagcctgggcgagccggtacagggtgtctacggctttgcaaagtcgctcctgaaagctctgaaagaagacggtgatgtggtgattgttgtctttgatgcgaaagcgccaagttttcgccacgaagcgtacgaagcttacaaagccgggcgtgctccaacgccggaagactttcctcgccaattggcgcttatgaaggaattagtggatttgcttggcctcgaacgcttggaagttcccggtttcgaggcagacgacgtattagcgactctcgcaaagaaagccgaacgtgagggctatgaagtccagatcttgacagcagatcgcgatcttttccagcttttatctccgcgcatctcggtgttacacccggaagggcatcgtatcaccccggaatggctctgggagaaatatggtttgcgtcccgaacaatgggtggattttcgcgccttagcaggcgatccgagcgacaatattccgggagttaaaggtatcggcgagaagacggcgctcaagctccttaaagaatgggggtcgttggagaacttgcttaagaatttagatcaggtcaaaccagagtcagtgcgtgagaagattcttgctcacctcgaagacctcaaattaagccgcgaattgtcccgtgtacgcaccgatttgccgctcgaagttgatttcggtcgccgccgcgaacctgactgggagggtcttaaagcgtttttagagcgtcttgaatttggttcgctcttgcatgaattcggccttttagaaagcccgttactggccgaagaagcaccttggccaccgcccgagggcgcgtttttaggttaccgtttgagtcgcccggaaccgatgtgggccgaattactggctcttgcagcgtctgcccagggacgtgtgtatcgcgcggaagaccctcatggtgcgctccgcggcctcttcgaagtccgtggactccttgccaaagacttagctgttgttgcattgcgcgaaggtcttgatttacctccgactgatgatccaatgcttcttgcgtacctcttggacccgtcaaacacgacgcccgaaggcgtagcccgtcgttacggcggcgagtggaccgaagatgcagcgaaacgcgcgttattggccgaacgtttgcacgaaaatttattaggacgtttgcaaggcgaggaacgtctcctctggctttacgaagaagtggagaaaccattgagtcgcgtgctcgcgcatatggaagctaccggtgtcaaattagacgtggcgtatttggagaatctcagccttgaagttgctgcccacatgcgccgcttggaggaagaagtattccgtttagcaggccgttcctttcgccttaactctcgcgatcagttagaacgtgtgttgttcgatgaacttggtctccctcctatcggcaagacagagaagaccggtaaacgtagcacttcagcggcggttttagaagctcttcgcgaagtccatcccattgtggacaagatcttgcagtaccgcgaaatggcgaaattgaaaggcacctatattgaccgtcttccggcattagtccacccgaaaacgggacgcctccatacccgcttcaaccaaacagccacggcgaccggtcgtttgtcctcctctgatccaaaccttcagaatattccagtacgtaccccattgggccagaagatccgccgtgcgtttgtagctgaggagggttggcgtttagtggccctcgattatcgtcaaattgaattacgtgtccttgcctcgctttctggcgatgagaacctcatccgcgtgtttcaggaaggcaaagacattcacactcaaacggcaagctggatgtttggattatcagctgaagcgatcgatcctttgatgcgtcgtgcagcgaagaccatcaatttcggtgttctctacggtatgagtgcctttcgtttgtcgcaggaattaggcattccctatgaagaagctcaggcgttcattcagaaatactttcaaagctatcccaaagttaaagcatggatcgagaagactctccgtgaaggccgcacacgtggttacgtagagaccttatttggacgtcgccgctatgttcccgatttaaacgctcgcgtgaaaggcaagcgtgaagccgccgaacgcatggcgttcaacatgcctgtacagggcacggcagctgacctcatgaaacttgcaatggtgcgcctttttccacaattgcgtgaagttggtgcccgcatgctcttgcaggtccacgatgaactcttgttagaagcgccaaaagagcgtgcggaagaggtggcagccctcgcgaaagaagttatggaaggcgtgtggcccttagcggtgcctcttgaagtcgaagttggtattggcgaggattggctggctgccaaagga

SEQ ID NO: 6116 - protein, 841 aa, synthetic construct
  REGION 1..841: note = Variant of DNA polymerase I from Thermus sp. strain 2.9
MHHHHHHGGSGVLPVFEPKGRVLLVDGHHLAYRNFFALKGLTTSLGEPVQGVYGFAKSLLKALKEDGDVVIVVFDAKAPSFRHEAYEAYKAGRAPTPEDFPRQLALMKELVDLLGLERLEVPGFEADDVLATLAKKAEREGYEVQILTADRDLFQLLSPRISVLHPEGHRITPEWLWEKYGLRPEQWVDFRALAGDPSDNIPGVKGIGEKTALKLLKEWGSLENLLKNLDQVKPESVREKILAHLEDLKLSRELSRVRTDLPLEVDFGRRREPDWEGLKAFLERLEFGSLLHEFGLLESPLLAEEAPWPPPEGAFLGYRLSRPEPMWAELLALAASAQGRVYRAEDPHGALRGLFEVRGLLAKDLAVVALREGLDLPPTDDPMLLAYLLDPSNTTPEGVARRYGGEWTEDAAKRALLAERLHENLLGRLQGEERLLWLYEEVEKPLSRVLAHMEATGVKLDVAYLENLSLEVAAHMRRLEEEVFRLAGRSFRLNSRDQLERVLFDELGLPPIGKTEKTGKRSTSAAVLEALREVHPIVDKILQYREMAKLKGTYIDRLPALVHPKTGRLHTRFNQTATATGRLSSSDPNLQNIPVRTPLGQKIRRAFVAEEGWRLVALDYRQIELRVLASLSGDENLIRVFQEGKDIHTQTASWMFGLSAEAIDPLMRRAAKTINFGVLYGMSAFRLSQELGIPYEEAQAFIQKYFQSYPKVKAWIEKTLREGRTRGYVETLFGRRRYVPDLNARVKGKREAAERMAFNMPVQGTAADLMKLAMVRLFPQLREVGARMLLQVHDELLLEAPKERAEEVAALAKEVMEGVWPLAVPLEVEVGIGEDWLAAKG

SEQ ID NO: 6117 - DNA, 2523 bp, synthetic construct
  misc_feature 1..2523: note = Variant of DNA polymerase I from Thermus sp. strain 2.9
  source 1..2523: mol_type = other DNA
atgcaccatcatcatcatcatggcggtagcggcgtgttaccggtgttcgagcctaaaggtcgcgtgcttctggttgatggccatcatctcgcgtatcgtaacttctttgccctgaaaggattaaccaccagcctgggcgagccggtacagggtgtctacggctttgcaaagtcgctcctgaaagctctgaaagaagacggtgatgtggtgattgttgtctttgatgcgaaagcgccaagttttcgccacgaagcgtacgaagcttacaaagccgggcgtgctccaacgccggaagactttcctcgccaattggcgcttatgaaggaattagtggatttgcttggcctcgaacgcttggaagttcccggtttcgaggcagacgacgtattagcgactctcgcaaagaaagccgaacgtgagggctatgaagtccagatcttgacagcagatcgcgatcttttccagcttttatctccgcgcatctcggtgttacacccggaagggcatcgtatcaccccggaatggctctgggagaaatatggtttgcgtcccgaacaatgggtggattttcgcgccttagcaggcgatccgagcgacaatattccgggagttaaaggtatcggcgagaagacggcgctcaagctccttaaagaatgggggtcgttggagaacttgcttaagaatttagatcaggtcaaaccagagtcagtgcgtgagaagattcttgctcacctcgaagacctcaaattaagccgcgaattgtcccgtgtacgcaccgatttgccgctcgaagttgatttcggtcgccgccgcgaacctgactgggagggtcttaaagcgtttttagagcgtcttgaatttggttcgctcttgcatgaattcggccttttagaaagcccgttactggccgaagaagcaccttggccaccgcccgagggcgcgtttttaggttaccgtttgagtcgcccggaaccgatgtgggccgaattactggctcttgcagcgtctgcccagggacgtgtgtatcgcgcggaagaccctcatggtgcgctccgcggcctcttcgaagtccgtggactccttgccaaagacttagctgttgttgcattgcgcgaaggtcttgatttacctccgactgatgatccaatgcttcttgcgtacctcttggacccgtcaaacacgacgcccgaaggcgtagcccgtcgttacggcggcgagtggaccgaagatgcagcgaaacgcgcgttattggccgaacgtttgcacgaaaatttattaggacgtttgcaaggcgaggaacgtctcctctggctttacgaagaagtggagaaaccattgagtcgcgtgctcgcgcatatggaagctaccggtgtcaaattagacgtggcgtatttggagaatctcagccttgaagttgctgcccacatgcgccgcttggaggaagaagtattccgtttagcaggccgttcctttcgccttaactctcgcgatcagttagaacgtgtgttgttcgatgaacttggtctccctcctatcggcaagacagagaagaccggtaaacgtagcacttcagcggcggttttagaagctcttcgcgaagtccatcccattgtggacaagatccggcagtaccgcgaaatggcgaaattgaaaggcacctatattgaccgtcttccggcattagtccacccgaaaacgggacgcctccatacccgcttcaaccaaacagccacggcgaccggtcgtttgtcctcctctgatccaaaccttcagaatattccagtacgtaccccattgggccagaagatccgccgtgcgtttgtagctgaggagggttggcgtttagtggccctcgattatcgtcaaattgaattacgtgtccttgcccatctttctggcgatgagaacctcatccgcgtgtttcaggaaggcaaagacattcacactcaaacggcaagctggatgtttggattatcagctgaagcgatcgatcctttgatgcgtcgtgcagcgaagaccatcaatttcggtgttctctacggtatgagtgcctttcgtttgtcgcaggaattaggcattccctatgaagaagctcaggcgttcattcagaaatactttcaaagctatcccaaagttaaagcatggatcgagaagactctccgtgaaggccgcacacgtggttacgtagagaccttatttggacgtcgccgctatgttcccgatttaaacgctcgcgtgaaaggcaagcgtgaagccgccgaacgcatggcgttcaacatgcctgtacagggcacggcagctgacctcatgaaacttgcaatggtgcgcctttttccacaattgcgtgaagttggtgcccgcatgctcttgcaggtccacgatgaactcttgttagaagcgccaaaagagcgtgcggaagaggtggcagccctcgcgaaagaagttatggaaggcgtgtggcccttagcggtgcctcttgaagtcgaagttggtattggcgaggattggctggctgccaaagga

SEQ ID NO: 6118 - protein, 841 aa, synthetic construct
  REGION 1..841: note = Variant of DNA polymerase I from Thermus sp. strain 2.9
MHHHHHHGGSGVLPVFEPKGRVLLVDGHHLAYRNFFALKGLTTSLGEPVQGVYGFAKSLLKALKEDGDVVIVVFDAKAPSFRHEAYEAYKAGRAPTPEDFPRQLALMKELVDLLGLERLEVPGFEADDVLATLAKKAEREGYEVQILTADRDLFQLLSPRISVLHPEGHRITPEWLWEKYGLRPEQWVDFRALAGDPSDNIPGVKGIGEKTALKLLKEWGSLENLLKNLDQVKPESVREKILAHLEDLKLSRELSRVRTDLPLEVDFGRRREPDWEGLKAFLERLEFGSLLHEFGLLESPLLAEEAPWPPPEGAFLGYRLSRPEPMWAELLALAASAQGRVYRAEDPHGALRGLFEVRGLLAKDLAVVALREGLDLPPTDDPMLLAYLLDPSNTTPEGVARRYGGEWTEDAAKRALLAERLHENLLGRLQGEERLLWLYEEVEKPLSRVLAHMEATGVKLDVAYLENLSLEVAAHMRRLEEEVFRLAGRSFRLNSRDQLERVLFDELGLPPIGKTEKTGKRSTSAAVLEALREVHPIVDKIRQYREMAKLKGTYIDRLPALVHPKTGRLHTRFNQTATATGRLSSSDPNLQNIPVRTPLGQKIRRAFVAEEGWRLVALDYRQIELRVLAHLSGDENLIRVFQEGKDIHTQTASWMFGLSAEAIDPLMRRAAKTINFGVLYGMSAFRLSQELGIPYEEAQAFIQKYFQSYPKVKAWIEKTLREGRTRGYVETLFGRRRYVPDLNARVKGKREAAERMAFNMPVQGTAADLMKLAMVRLFPQLREVGARMLLQVHDELLLEAPKERAEEVAALAKEVMEGVWPLAVPLEVEVGIGEDWLAAKG

SEQ ID NO: 6119 - DNA, 2523 bp, synthetic construct
  misc_feature 1..2523: note = Variant of DNA polymerase I from Thermus sp. strain 2.9
  source 1..2523: mol_type = other DNA
atgcaccatcatcatcatcatggcggtagcggcgtgttaccggtgttcgagcctaaaggtcgcgtgcttctggttgatggccatcatctcgcgtatcgtaacttctttgccctgaaaggattaaccaccagcctgggcgagccggtacagggtgtctacggctttgcaaagtcgctcctgaaagctctgaaagaagacggtgatgtggtgattgttgtctttgatgcgaaagcgccaagttttcgccacgaagcgtacgaagcttacaaagccgggcgtgctccaacgccggaagactttcctcgccaattggcgcttatgaaggaattagtggatttgcttggcctcgaacgcttggaagttcccggtttcgaggcagacgacgtattagcgactctcgcaaagaaagccgaacgtgagggctatgaagtccagatcttgacagcagatcgcgatcttttccagcttttatctccgcgcatctcggtgttacacccggaagggcatcgtatcaccccggaatggctctgggagaaatatggtttgcgtcccgaacaatgggtggattttcgcgccttagcaggcgatccgagcgacaatattccgggagttaaaggtatcggcgagaagacggcgctcaagctccttaaagaatgggggtcgttggagaacttgcttaagaatttagatcaggtcaaaccagagtcagtgcgtgagaagattcttgctcacctcgaagacctcaaattaagccgcgaattgtcccgtgtacgcaccgatttgccgctcgaagttgatttcggtcgccgccgcgaacctgactgggagggtcttaaagcgtttttagagcgtcttgaatttggttcgctcttgcatgaattcggccttttagaaagcccgttactggccgaagaagcaccttggccaccgcccgagggcgcgtttttaggttaccgtttgagtcgcccggaaccgatgtgggccgaattactggctcttgcagcgtctgcccagggacgtgtgtatcgcgcggaagaccctcatggtgcgctccgcggcctcttcgaagtccgtggactccttgccaaagacttagctgttgttgcattgcgcgaaggtcttgatttacctccgactgatgatccaatgcttcttgcgtacctcttggacccgtcaaacacgacgcccgaaggcgtagcccgtcgttacggcggcgagtggaccgaagatgcagcgaaacgcgcgttattggccgaacgtttgcacgaaaatttattaggacgtttgcaaggcgaggaacgtctcctctggctttacgaagaagtggagaaaccattgagtcgcgtgctcgcgcatatggaagctaccggtgtcaaattagacgtggcgtatttggagaatctcagccttgaagttgctgcccacatgcgccgcttggaggaagaagtattccgtttagcaggccgttcctttcgccttaactctcgcgatcagttagaacgtgtgttgttcgatgaacttggtctccctcctatcggcaagacagagaagaccggtaaacgtagcacttcagcggcggttttagaagctcttcgcgaagtccatcccattgtggacaagatcttgcagtaccgcgaaatggcgaaattgaaaggcacctatattgaccgtcttccggcattagtccacccgaaaacgggacgcctccatacccgcttcaaccaaacagccacggcgaccggtcgtttgtcctcctctgatccaaaccttcagaatattccagtacgtaccccattgggccagaagatccgccgtgcgtttgtagctgaggagggttggcgtttagtggccctcgattatcgtcaaattgaattacgtgtccttgcccatctttctggcgatgagaacctcatccgcgtgtttcaggaaggcaaagacattcacactcaaacggcaagctggatgtttggattatcagctgaagcgatcgatcctttgatgcgtcgtgcagcgaagaccatcaatttcggtgttctctacggtatgagtgcctttcgtttgtcgcaggaattaggcattccctatgaagaagctcaggcgttcattcagaaatactttcaaagctatcccaaagttaaagcatggatcgagaagactctccgtgaaggccgcacacgtggttacgtagagaccttatttggacgtcgccgctatgttcccgatttaaacgctcgcgtgaaaggcaagcgtgaagccgccgaacgcatggcgttcaacatgcctgtacagggcacggcagctgacctcatgaaacttgcaatggtgcgcctttttccacaattgcgtgaagttggtgcccgcatgctcttgcaggtccacgatgaactcttgacggaagcgccaaaagagcgtgcggaagaggtggcagccctcgcgaaagaagttatggaaggcgtgtggcccttagcggtgcctcttgaagtcgaagttggtattggcgaggattggctggctgccaaagga

SEQ ID NO: 6120 - protein, 841 aa, synthetic construct
  REGION 1..841: note = Variant of DNA polymerase I from Thermus sp. strain 2.9
MHHHHHHGGSGVLPVFEPKGRVLLVDGHHLAYRNFFALKGLTTSLGEPVQGVYGFAKSLLKALKEDGDVVIVVFDAKAPSFRHEAYEAYKAGRAPTPEDFPRQLALMKELVDLLGLERLEVPGFEADDVLATLAKKAEREGYEVQILTADRDLFQLLSPRISVLHPEGHRITPEWLWEKYGLRPEQWVDFRALAGDPSDNIPGVKGIGEKTALKLLKEWGSLENLLKNLDQVKPESVREKILAHLEDLKLSRELSRVRTDLPLEVDFGRRREPDWEGLKAFLERLEFGSLLHEFGLLESPLLAEEAPWPPPEGAFLGYRLSRPEPMWAELLALAASAQGRVYRAEDPHGALRGLFEVRGLLAKDLAVVALREGLDLPPTDDPMLLAYLLDPSNTTPEGVARRYGGEWTEDAAKRALLAERLHENLLGRLQGEERLLWLYEEVEKPLSRVLAHMEATGVKLDVAYLENLSLEVAAHMRRLEEEVFRLAGRSFRLNSRDQLERVLFDELGLPPIGKTEKTGKRSTSAAVLEALREVHPIVDKILQYREMAKLKGTYIDRLPALVHPKTGRLHTRFNQTATATGRLSSSDPNLQNIPVRTPLGQKIRRAFVAEEGWRLVALDYRQIELRVLAHLSGDENLIRVFQEGKDIHTQTASWMFGLSAEAIDPLMRRAAKTINFGVLYGMSAFRLSQELGIPYEEAQAFIQKYFQSYPKVKAWIEKTLREGRTRGYVETLFGRRRYVPDLNARVKGKREAAERMAFNMPVQGTAADLMKLAMVRLFPQLREVGARMLLQVHDELLTEAPKERAEEVAALAKEVMEGVWPLAVPLEVEVGIGEDWLAAKG

SEQ ID NO: 6121 - DNA, 2523 bp, synthetic construct
  misc_feature 1..2523: note = Variant of DNA polymerase I from Thermus sp. strain 2.9
  source 1..2523: mol_type = other DNA
atgcaccatcatcatcatcatggcggtagcggcgtgttaccggtgttcgagcctaaaggtcgcgtgcttctggttgatggccatcatctcgcgtatcgtaacttctttgccctgaaaggattaaccaccagcctgggcgagccggtacagggtgtctacggctttgcaaagtcgctcctgaaagctctgaaagaagacggtgatgtggtgattgttgtctttgatgcgaaagcgccaagttttcgccacgaagcgtacgaagcttacaaagccgggcgtgctccaacgccggaagactttcctcgccaattggcgcttatgaaggaattagtggatttgcttggcctcgaacgcttggaagttcccggtttcgaggcagacgacgtattagcgactctcgcaaagaaagccgaacgtgagggctatgaagtccagatcttgacagcagatcgcgatcttttccagcttttatctccgcgcatctcggtgttacacccggaagggcatcgtatcaccccggaatggctctgggagaaatatggtttgcgtcccgaacaatgggtggattttcgcgccttagcaggcgatccgagcgacaatattccgggagttaaaggtatcggcgagaagacggcgctcaagctccttaaagaatgggggtcgttggagaacttgcttaagaatttagatcaggtcaaaccagagtcagtgcgtgagaagattcttgctcacctcgaagacctcaaattaagccgcgaattgtcccgtgtacgcaccgatttgccgctcgaagttgatttcggtcgccgccgcgaacctgactgggagggtcttaaagcgtttttagagcgtcttgaatttggttcgctcttgcatgaattcggccttttagaaagcccgttactggccgaagaagcaccttggccaccgcccgagggcgcgtttttaggttaccgtttgagtcgcccggaaccgatgtgggccgaattactggctcttgcagcgtctgcccagggacgtgtgtatcgcgcggaagaccctcatggtgcgctccgcggcctcttcgaagtccgtggactccttgccaaagacttagctgttgttgcattgcgcgaaggtcttgatttacctccgactgatgatccaatgcttcttgcgtacctcttggacccgtcaaacacgacgcccgaaggcgtagcccgtcgttacggcggcgagtggaccgaagatgcagcgaaacgcgcgttattggccgaacgtttgcacgaaaatttattaggacgtttgcaaggcgaggaacgtctcgtgtggctttacgaagaagtggagaaaccattgagtcgcgtgctcgcgcatatggaagctaccggtgtcaaattagacgtggcgtatttggagaatctcagccttgaagttgctgcccacatgcgccgcttggaggaagaagtattccgtttagcaggccgttcctttcgccttaactctcgcgatcagttagaacgtgtgttgttcgatgaacttggtctccctcctatcggcaagacagagaagaccggtaaacgtagcacttcagcggcggttttagaagctcttcgcgaagtccatcccattgtggacaagatcttgcagtaccgcgaaatggcgaaattgaaaggcacctatattgaccgtcttccggcattagtccacccgaaaacgggacgcctccatacccgcttcaaccaaacagccacggcgaccggtcgtttgtcctcctctgatccaaaccttcagaatattccagtacgtaccccattgggccagaagatccgccgtgcgtttgtagctgaggagggttggcgtttagtggccctcgattatcgtcaaattgaattacgtgtccttgcccatctttctggcgatgagaacctcatccgcgtgtttcaggaaggcaaagacattcacactcaaacggcaagctggatgtttggattatcagctgaagcgatcgatcctttgatgcgtcgtgcagcgaagaccatcaatttcggtgttctctacggtatgagtgcctttcgtttgtcgcaggaattaggcattccctatgaagaagctcaggcgttcattcagaaatactttcaaagctatcccaaagttaaagcatggatcgagaagactctccgtgaaggccgcacacgtggttacgtagagaccttatttggacgtcgccgctatgttcccgatttaaacgctcgcgtgaaaggcaagcgtgaagccgccgaacgcatggcgttcaacatgcctgtacagggcacggcagctgacctcatgaaacttgcaatggtgcgcctttttccacaattgcgtgaagttggtgcccgcatgctcttgcaggtccacgatgaactcttgttagaagcgccaaaagagcgtgcggaagaggtggcagccctcgcgaaagaagttatggaaggcgtgtggcccttagcggtgcctcttgaagtcgaagttggtattggcgaggattggctggctgccaaagga

SEQ ID NO: 6122 - protein, 841 aa, synthetic construct
  REGION 1..841: note = Variant of DNA polymerase I from Thermus sp. strain 2.9
MHHHHHHGGSGVLPVFEPKGRVLLVDGHHLAYRNFFALKGLTTSLGEPVQGVYGFAKSLLKALKEDGDVVIVVFDAKAPSFRHEAYEAYKAGRAPTPEDFPRQLALMKELVDLLGLERLEVPGFEADDVLATLAKKAEREGYEVQILTADRDLFQLLSPRISVLHPEGHRITPEWLWEKYGLRPEQWVDFRALAGDPSDNIPGVKGIGEKTALKLLKEWGSLENLLKNLDQVKPESVREKILAHLEDLKLSRELSRVRTDLPLEVDFGRRREPDWEGLKAFLERLEFGSLLHEFGLLESPLLAEEAPWPPPEGAFLGYRLSRPEPMWAELLALAASAQGRVYRAEDPHGALRGLFEVRGLLAKDLAVVALREGLDLPPTDDPMLLAYLLDPSNTTPEGVARRYGGEWTEDAAKRALLAERLHENLLGRLQGEERLVWLYEEVEKPLSRVLAHMEATGVKLDVAYLENLSLEVAAHMRRLEEEVFRLAGRSFRLNSRDQLERVLFDELGLPPIGKTEKTGKRSTSAAVLEALREVHPIVDKILQYREMAKLKGTYIDRLPALVHPKTGRLHTRFNQTATATGRLSSSDPNLQNIPVRTPLGQKIRRAFVAEEGWRLVALDYRQIELRVLAHLSGDENLIRVFQEGKDIHTQTASWMFGLSAEAIDPLMRRAAKTINFGVLYGMSAFRLSQELGIPYEEAQAFIQKYFQSYPKVKAWIEKTLREGRTRGYVETLFGRRRYVPDLNARVKGKREAAERMAFNMPVQGTAADLMKLAMVRLFPQLREVGARMLLQVHDELLLEAPKERAEEVAALAKEVMEGVWPLAVPLEVEVGIGEDWLAAKG

SEQ ID NO: 6123 - DNA, 2523 bp, synthetic construct
  misc_feature 1..2523: note = Variant of DNA polymerase I from Thermus sp. strain 2.9
  source 1..2523: mol_type = other DNA
atgcaccatcatcatcatcatggcggtagcggcgtgttaccggtgttcgagcctaaaggtcgcgtgcttctggttgatggccatcatctcgcgtatcgtaacttctttgccctgaaaggattaaccaccagcctgggcgagccggtacagggtgtctacggctttgcaaagtcgctcctgaaagctctgaaagaagacggtgatgtggtgattgttgtctttgatgcgaaagcgccaagttttcgccacgaagcgtacgaagcttacaaagccgggcgtgctccaacgccggaagactttcctcgccaattggcgcttatgaaggaattagtggatttgcttggcctcgaacgcttggaagttcccggtttcgaggcagacgacgtattagcgactctcgcaaagaaagccgaacgtgagggctatgaagtccagatcttgacagcagatcgcgatcttttccagcttttatctccgcgcatctcggtgttacacccggaagggcatcgtatcaccccggaatggctctgggagaaatatggtttgcgtcccgaacaatgggtggattttcgcgccttagcaggcgatccgagcgacaatattccgggagttaaaggtatcggcgagaagacggcgctcaagctccttaaagaatgggggtcgttggagaacttgcttaagaatttagatcaggtcaaaccagagtcagtgcgtgagaagattcttgctcacctcgaagacctcaaattaagccgcgaattgtcccgtgtacgcaccgatttgccgctcgaagttgatttcggtcgccgccgcgaacctgactgggagggtcttaaagcgtttttagagcgtcttgaatttggttcgctcttgcatgaattcggccttttagaaagcccgttactggccgaagaagcaccttggccaccgcccgagggcgcgtttttaggttaccgtttgagtcgcccggaaccgatgtgggccgaattactggctcttgcagcgtctgcccagggacgtgtgtatcgcgcggaagaccctcatggtgcgctccgcggcctcttcgaagtccgtggactccttgccaaagacttagctgttgttgcattgcgcgaaggtcttgatttacctccgactgatgatccaatgcttcttgcgtacctcttggacccgtcaaacacgacgcccgaaggcgtagcccgtcgttacggcggcgagtggaccgaagatgcagcgaaacgcgcgttattggccgaacgtttgcacgaaaatttattaggacgtttgcaaggcgaggaacgtctctggtggctttacgaagaagtggagaaaccattgagtcgcgtgctcgcgcatatggaagctaccggtgtcaaattagacgtggcgtatttggagaatctcagccttgaagttgctgcccacatgcgccgcttggaggaagaagtattccgtttagcaggccgttcctttcgccttaactctcgcgatcagttagaacgtgtgttgttcgatgaacttggtctccctcctatcggcaagacagagaagaccggtaaacgtagcacttcagcggcggttttagaagctcttcgcgaagtccatcccattgtggacaagatcttgcagtaccgcgaaatggcgaaattgaaaggcacctatattgaccgtcttccggcattagtccacccgaaaacgggacgcctccatacccgcttcaaccaaacagccacggcgaccggtcgtttgtcctcctctgatccaaaccttcagaatattccagtacgtaccccattgggccagaagatccgccgtgcgtttgtagctgaggagggttggcgtttagtggccctcgattatcgtcaaattgaattacgtgtccttgcccatctttctggcgatgagaacctcatccgcgtgtttcaggaaggcaaagacattcacactcaaacggcaagctggatgtttggattatcagctgaagcgatcgatcctttgatgcgtcgtgcagcgaagaccatcaatttcggtgttctctacggtatgagtgcctttcgtttgtcgcaggaattaggcattccctatgaagaagctcaggcgttcattcagaaatactttcaaagctatcccaaagttaaagcatggatcgagaagactctccgtgaaggccgcacacgtggttacgtagagaccttatttggacgtcgccgctatgttcccgatttaaacgctcgcgtgaaaggcaagcgtgaagccgccgaacgcatggcgttcaacatgcctgtacagggcacggcagctgacctcatgaaacttgcaatggtgcgcctttttccacaattgcgtgaagttggtgcccgcatgctcttgcaggtccacgatgaactcttgttagaagcgccaaaagagcgtgcggaagaggtggcagccctcgcgaaagaagttatggaaggcgtgtggcccttagcggtgcctcttgaagtcgaagttggtattggcgaggattggctggctgccaaagga

SEQ ID NO: 6124 - protein, 841 aa, synthetic construct
  REGION 1..841: note = Variant of DNA polymerase I from Thermus sp. strain 2.9
MHHHHHHGGSGVLPVFEPKGRVLLVDGHHLAYRNFFALKGLTTSLGEPVQGVYGFAKSLLKALKEDGDVVIVVFDAKAPSFRHEAYEAYKAGRAPTPEDFPRQLALMKELVDLLGLERLEVPGFEADDVLATLAKKAEREGYEVQILTADRDLFQLLSPRISVLHPEGHRITPEWLWEKYGLRPEQWVDFRALAGDPSDNIPGVKGIGEKTALKLLKEWGSLENLLKNLDQVKPESVREKILAHLEDLKLSRELSRVRTDLPLEVDFGRRREPDWEGLKAFLERLEFGSLLHEFGLLESPLLAEEAPWPPPEGAFLGYRLSRPEPMWAELLALAASAQGRVYRAEDPHGALRGLFEVRGLLAKDLAVVALREGLDLPPTDDPMLLAYLLDPSNTTPEGVARRYGGEWTEDAAKRALLAERLHENLLGRLQGEERLWWLYEEVEKPLSRVLAHMEATGVKLDVAYLENLSLEVAAHMRRLEEEVFRLAGRSFRLNSRDQLERVLFDELGLPPIGKTEKTGKRSTSAAVLEALREVHPIVDKILQYREMAKLKGTYIDRLPALVHPKTGRLHTRFNQTATATGRLSSSDPNLQNIPVRTPLGQKIRRAFVAEEGWRLVALDYRQIELRVLAHLSGDENLIRVFQEGKDIHTQTASWMFGLSAEAIDPLMRRAAKTINFGVLYGMSAFRLSQELGIPYEEAQAFIQKYFQSYPKVKAWIEKTLREGRTRGYVETLFGRRRYVPDLNARVKGKREAAERMAFNMPVQGTAADLMKLAMVRLFPQLREVGARMLLQVHDELLLEAPKERAEEVAALAKEVMEGVWPLAVPLEVEVGIGEDWLAAKG

SEQ ID NO: 6125 - DNA, 2523 bp, synthetic construct
  misc_feature 1..2523: note = Variant of DNA polymerase I from Thermus sp. strain 2.9
  source 1..2523: mol_type = other DNA
atgcaccatcatcatcatcatggcggtagcggcgtgttaccggtgttcgagcctaaaggtcgcgtgcttctggttgatggccatcatctcgcgtatcgtaacttctttgccctgaaaggattaaccaccagcctgggcgagccggtacagggtgtctacggctttgcaaagtcgctcctgaaagctctgaaagaagacggtgatgtggtgattgttgtctttgatgcgaaagcgccaagttttcgccacgaagcgtacgaagcttacaaagccgggcgtgctccaacgccggaagactttcctcgccaattggcgcttatgaaggaattagtggatttgcttggcctcgaacgcttggaagttcccggtttcgaggcagacgacgtattagcgactctcgcaaagaaagccgaacgtgagggctatgaagtccagatcttgacagcagatcgcgatcttttccagcttttatctccgcgcatctcggtgttacacccggaagggcatcgtatcaccccggaatggctctgggagaaatatggtttgcgtcccgaacaatgggtggattttcgcgccttagcaggcgatccgagcgacaatattccgggagttaaaggtatcggcgagaagacggcgctcaagctccttaaagaatgggggtcgttggagaacttgcttaagaatttagatcaggtcaaaccagagtcagtgcgtgagaagattcttgctcacctcgaagacctcaaattaagccgcgaattgtcccgtgtacgcaccgatttgccgctcgaagttgatttcggtcgccgccgcgaacctgactgggagggtcttaaagcgtttttagagcgtcttgaatttggttcgctcttgcatgaattcggccttttagaaagcccgttactggccgaagaagcaccttggccaccgcccgagggcgcgtttttaggttaccgtttgagtcgcccggaaccgatgtgggccgaattactggctcttgcagcgtctgcccagggacgtgtgtatcgcgcggaagaccctcatggtgcgctccgcggcctcttcgaagtccgtggactccttgccaaagacttagctgttgttgcattgcgcgaaggtcttgatttacctccgactgatgatccaatgcttcttgcgtacctcttggacccgtcaaacacgacgcccgaaggcgtagcccgtcgttacaagggcgagtggaccgaagatgcagcgaaacgcgcgttattggccgaacgtttgcacgaaaatttattaggacgtttgcaaggcgaggaacgtctcctctggctttacgaagaagtggagaaaccattgagtcgcgtgctcgcgcatatggaagctaccggtgtcaaattagacgtggcgtatttggagaatctcagccttgaagttgctgcccacatgcgccgcttggaggaagaagtattccgtttagcaggccgttcctttcgccttaactctcgcgatcagttagaacgtgtgttgttcgatgaacttggtctccctcctatcggcaagacagagaagaccggtaaacgtagcacttcagcggcggttttagaagctcttcgcgaagtccatcccattgtggacaagatcttgcagtaccgcgaaatggcgaaattgaaaggcacctatattgaccgtcttccggcattagtccacccgaaaacgggacgcctccatacccgcttcaaccaaacagccacggcgaccggtcgtttgtcctcctctgatccaaaccttcagaatattccagtacgtaccccattgggccagaagatccgccgtgcgtttgtagctgaggagggttggcgtttagtggccctcgattatcgtcaaattgaattacgtgtccttgcccatctttctggcgatgagaacctcatccgcgtgtttcaggaaggcaaagacattcacactcaaacggcaagctggatgtttggattatcagctgaagcgatcgatcctttgatgcgtcgtgcagcgaagaccatcaatttcggtgttctctacggtatgagtgcctttcgtttgtcgcaggaattaggcattccctatgaagaagctcaggcgttcattcagaaatactttcaaagctatcccaaagttaaagcatggatcgagaagactctccgtgaaggccgcacacgtggttacgtagagaccttatttggacgtcgccgctatgttcccgatttaaacgctcgcgtgaaaggcaagcgtgaagccgccgaacgcatggcgttcaacatgcctgtacagggcacggcagctgacctcatgaaacttgcaatggtgcgcctttttccacaattgcgtgaagttggtgcccgcatgctcttgcaggtccacgatgaactcttgttagaagcgccaaaagagcgtgcggaagaggtggcagccctcgcgaaagaagttatggaaggcgtgtggcccttagcggtgcctcttgaagtcgaagttggtattggcgaggattggctggctgccaaagga

SEQ ID NO: 6126 - protein, 841 aa, synthetic construct
  REGION 1..841: note = Variant of DNA polymerase I from Thermus sp. strain 2.9
MHHHHHHGGSGVLPVFEPKGRVLLVDGHHLAYRNFFALKGLTTSLGEPVQGVYGFAKSLLKALKEDGDVVIVVFDAKAPSFRHEAYEAYKAGRAPTPEDFPRQLALMKELVDLLGLERLEVPGFEADDVLATLAKKAEREGYEVQILTADRDLFQLLSPRISVLHPEGHRITPEWLWEKYGLRPEQWVDFRALAGDPSDNIPGVKGIGEKTALKLLKEWGSLENLLKNLDQVKPESVREKILAHLEDLKLSRELSRVRTDLPLEVDFGRRREPDWEGLKAFLERLEFGSLLHEFGLLESPLLAEEAPWPPPEGAFLGYRLSRPEPMWAELLALAASAQGRVYRAEDPHGALRGLFEVRGLLAKDLAVVALREGLDLPPTDDPMLLAYLLDPSNTTPEGVARRYKGEWTEDAAKRALLAERLHENLLGRLQGEERLLWLYEEVEKPLSRVLAHMEATGVKLDVAYLENLSLEVAAHMRRLEEEVFRLAGRSFRLNSRDQLERVLFDELGLPPIGKTEKTGKRSTSAAVLEALREVHPIVDKILQYREMAKLKGTYIDRLPALVHPKTGRLHTRFNQTATATGRLSSSDPNLQNIPVRTPLGQKIRRAFVAEEGWRLVALDYRQIELRVLAHLSGDENLIRVFQEGKDIHTQTASWMFGLSAEAIDPLMRRAAKTINFGVLYGMSAFRLSQELGIPYEEAQAFIQKYFQSYPKVKAWIEKTLREGRTRGYVETLFGRRRYVPDLNARVKGKREAAERMAFNMPVQGTAADLMKLAMVRLFPQLREVGARMLLQVHDELLLEAPKERAEEVAALAKEVMEGVWPLAVPLEVEVGIGEDWLAAKG

SEQ ID NO: 6127 - DNA, 2523 bp, synthetic construct
  misc_feature 1..2523: note = Variant of DNA polymerase I from Thermus sp. strain 2.9
  source 1..2523: mol_type = other DNA
atgcaccatcatcatcatcatggcggtagcggcgtgttaccggtgttcgagcctaaaggtcgcgtgcttctggttgatggccatcatctcgcgtatcgtaacttctttgccctgaaaggattaaccaccagcctgggcgagccggtacagggtgtctacggctttgcaaagtcgctcctgaaagctctgaaagaagacggtgatgtggtgattgttgtctttgatgcgaaagcgccaagttttcgccacgaagcgtacgaagcttacaaagccgggcgtgctccaacgccggaagactttcctcgccaattggcgcttatgaaggaattagtggatttgcttggcctcgaacgcttggaagttcccggtttcgaggcagacgacgtattagcgactctcgcaaagaaagccgaacgtgagggctatgaagtccagatcttgacagcagatcgcgatcttttccagcttttatctccgcgcatctcggtgttacacccggaagggcatcgtatcaccccggaatggctctgggagaaatatggtttgcgtcccgaacaatgggtggattttcgcgccttagcaggcgatccgagcgacaatattccgggagttaaaggtatcggcgagaagacggcgctcaagctccttaaagaatgggggtcgttggagaacttgcttaagaatttagatcaggtcaaaccagagtcagtgcgtgagaagattcttgctcacctcgaagacctcaaattaagccgcgaattgtcccgtgtacgcaccgatttgccgctcgaagttgatttcggtcgccgccgcgaacctgactgggagggtcttaaagcgtttttagagcgtcttgaatttggttcgctcttgcatgaattcggccttttagaaagcccgttactggccgaagaagcaccttggccaccgcccgagggcgcgtttttaggttaccgtttgagtcgcccggaaccgatgtgggccgaattactggctcttgcagcgtctgcccagggacgtgtgtatcgcgcggaagaccctcatggtgcgctccgcggcctcttcgaagtccgtggactccttgccaaagacttagctgttgttgcattgcgcgaaggtcttgatttaccttttactgatgatccaatgcttcttgcgtacctcttggacccgtcaaacacgacgcccgaaggcgtagcccgtcgttacggcggcgagtggaccgaagatgcagcgaaacgcgcgttattggccgaacgtttgcacgaaaatttattaggacgtttgcaaggcgaggaacgtctcctctggctttacgaagaagtggagaaaccattgagtcgcgtgctcgcgcatatggaagctaccggtgtcaaattagacgtggcgtatttggagaatctcagccttgaagttgctgcccacatgcgccgcttggaggaagaagtattccgtttagcaggccgttcctttcgccttaactctcgcgatcagttagaacgtgtgttgttcgatgaacttggtctccctcctatcggcaagacagagaagaccggtaaacgtagcacttcagcggcggttttagaagctcttcgcgaagtccatcccattgtggacaagatcttgcagtaccgcgaaatggcgaaattgaaaggcacctatattgaccgtcttccggcattagtccacccgaaaacgggacgcctccatacccgcttcaaccaaacagccacggcgaccggtcgtttgtcctcctctgatccaaaccttcagaatattccagtacgtaccccattgggccagaagatccgccgtgcgtttgtagctgaggagggttggcgtttagtggccctcgattatcgtcaaattgaattacgtgtccttgcccatctttctggcgatgagaacctcatccgcgtgtttcaggaaggcaaagacattcacactcaaacggcaagctggatgtttggattatcagctgaagcgatcgatcctttgatgcgtcgtgcagcgaagaccatcaatttcggtgttctctacggtatgagtgcctttcgtttgtcgcaggaattaggcattccctatgaagaagctcaggcgttcattcagaaatactttcaaagctatcccaaagttaaagcatggatcgagaagactctccgtgaaggccgcacacgtggttacgtagagaccttatttggacgtcgccgctatgttcccgatttaaacgctcgcgtgaaaggcaagcgtgaagccgccgaacgcatggcgttcaacatgcctgtacagggcacggcagctgacctcatgaaacttgcaatggtgcgcctttttccacaattgcgtgaagttggtgcccgcatgctcttgcaggtccacgatgaactcttgttagaagcgccaaaagagcgtgcggaagaggtggcagccctcgcgaaagaagttatggaaggcgtgtggcccttagcggtgcctcttgaagtcgaagttggtattggcgaggattggctggctgccaaagga

SEQ ID NO: 6128 - protein, 841 aa, synthetic construct
  REGION 1..841: note = Variant of DNA polymerase I from Thermus sp. strain 2.9
MHHHHHHGGSGVLPVFEPKGRVLLVDGHHLAYRNFFALKGLTTSLGEPVQGVYGFAKSLLKALKEDGDVVIVVFDAKAPSFRHEAYEAYKAGRAPTPEDFPRQLALMKELVDLLGLERLEVPGFEADDVLATLAKKAEREGYEVQILTADRDLFQLLSPRISVLHPEGHRITPEWLWEKYGLRPEQWVDFRALAGDPSDNIPGVKGIGEKTALKLLKEWGSLENLLKNLDQVKPESVREKILAHLEDLKLSRELSRVRTDLPLEVDFGRRREPDWEGLKAFLERLEFGSLLHEFGLLESPLLAEEAPWPPPEGAFLGYRLSRPEPMWAELLALAASAQGRVYRAEDPHGALRGLFEVRGLLAKDLAVVALREGLDLPFTDDPMLLAYLLDPSNTTPEGVARRYGGEWTEDAAKRALLAERLHENLLGRLQGEERLLWLYEEVEKPLSRVLAHMEATGVKLDVAYLENLSLEVAAHMRRLEEEVFRLAGRSFRLNSRDQLERVLFDELGLPPIGKTEKTGKRSTSAAVLEALREVHPIVDKILQYREMAKLKGTYIDRLPALVHPKTGRLHTRFNQTATATGRLSSSDPNLQNIPVRTPLGQKIRRAFVAEEGWRLVALDYRQIELRVLAHLSGDENLIRVFQEGKDIHTQTASWMFGLSAEAIDPLMRRAAKTINFGVLYGMSAFRLSQELGIPYEEAQAFIQKYFQSYPKVKAWIEKTLREGRTRGYVETLFGRRRYVPDLNARVKGKREAAERMAFNMPVQGTAADLMKLAMVRLFPQLREVGARMLLQVHDELLLEAPKERAEEVAALAKEVMEGVWPLAVPLEVEVGIGEDWLAAKG

SEQ ID NO: 6129 - DNA, 2523 bp, synthetic construct
  misc_feature 1..2523: note = Variant of DNA polymerase I from Thermus sp. strain 2.9
  source 1..2523: mol_type = other DNA
atgcaccatcatcatcatcatggcggtagcggcgtgttaccggtgttcgagcctaaaggtcgcgtgcttctggttgatggccatcatctcgcgtatcgtaacttctttgccctgaaaggattaaccaccagcctgggcgagccggtacagggtgtctacggctttgcaaagtcgctcctgaaagctctgaaagaagacggtgatgtggtgattgttgtctttgatgcgaaagcgccaagttttcgccacgaagcgtacgaagcttacaaagccgggcgtgctccaacgccggaagactttcctcgccaattggcgcttatgaaggaattagtggatttgcttggcctcgaacgcttggaagttcccggtttcgaggcagacgacgtattagcgactctcgcaaagaaagccgaacgtgagggctatgaagtccagatcttgacagcagatcgcgatcttttccagcttttatctccgcgcatctcggtgttacacccggaagggcatcgtatcaccccggaatggctctgggagaaatatggtttgcgtcccgaacaatgggtggattttcgcgccttagcaggcgatccgagcgacaatattccgggagttaaaggtatcggcgagaagacggcgctcaagctccttaaagaatgggggtcgttggagaacttgcttaagaatttagatcaggtcaaaccagagtcagtgcgtgagaagattcttgctcacctcgaagacctcaaattaagccgcgaattgtcccgtgtacgcaccgatttgccgctcgaagttgatttcggtcgccgccgcgaacctgactgggagggtcttaaagcgtttttagagcgtcttgaatttggttcgctcttgcatgaattcggccttttagaaagcccgttactggccgaagaagcaccttggccaccgcccgagggcgcgtttttaggttaccgtttgagtcgcccggaaccgatgtgggccgaattactggctcttgcagcgtctgcccagggacgtgtgtatcgcgcggaagaccctcatggtgcgctccgcggcctcttcgaagtccgtggactccttgccaaagacttagctgttgttgcattgcgcgaaggtcttgatttacctccgactgatgatccaatgcttcttgcgtacctcttggacccgtcaaacacgacgcccgaaggcgaggcccgtcgttacggcggcgagtggaccgaagatgcagcgaaacgcgcgttattggccgaacgtttgcacgaaaatttattaggacgtttgcaaggcgaggaacgtctcctctggctttacgaagaagtggagaaaccattgagtcgcgtgctcgcgcatatggaagctaccggtgtcaaattagacgtggcgtatttggagaatctcagccttgaagttgctgcccacatgcgccgcttggaggaagaagtattccgtttagcaggccgttcctttcgccttaactctcgcgatcagttagaacgtgtgttgttcgatgaacttggtctccctcctatcggcaagacagagaagaccggtaaacgtagcacttcagcggcggttttagaagctcttcgcgaagtccatcccattgtggacaagatcttgcagtaccgcgaaatggcgaaattgaaaggcacctatattgaccgtcttccggcattagtccacccgaaaacgggacgcctccatacccgcttcaaccaaacagccacggcgaccggtcgtttgtcctcctctgatccaaaccttcagaatattccagtacgtaccccattgggccagaagatccgccgtgcgtttgtagctgaggagggttggcgtttagtggccctcgattatcgtcaaattgaattacgtgtccttgcccatctttctggcgatgagaacctcatccgcgtgtttcaggaaggcaaagacattcacactcaaacggcaagctggatgtttggattatcagctgaagcgatcgatcctttgatgcgtcgtgcagcgaagaccatcaatttcggtgttctctacggtatgagtgcctttcgtttgtcgcaggaattaggcattccctatgaagaagctcaggcgttcattcagaaatactttcaaagctatcccaaagttaaagcatggatcgagaagactctccgtgaaggccgcacacgtggttacgtagagaccttatttggacgtcgccgctatgttcccgatttaaacgctcgcgtgaaaggcaagcgtgaagccgccgaacgcatggcgttcaacatgcctgtacagggcacggcagctgacctcatgaaacttgcaatggtgcgcctttttccacaattgcgtgaagttggtgcccgcatgctcttgcaggtccacgatgaactcttgttagaagcgccaaaagagcgtgcggaagaggtggcagccctcgcgaaagaagttatggaaggcgtgtggcccttagcggtgcctcttgaagtcgaagttggtattggcgaggattggctggctgccaaagga

SEQ ID NO: 6130 - protein, 841 aa, synthetic construct
  REGION 1..841: note = Variant of DNA polymerase I from Thermus sp. strain 2.9
MHHHHHHGGSGVLPVFEPKGRVLLVDGHHLAYRNFFALKGLTTSLGEPVQGVYGFAKSLLKALKEDGDVVIVVFDAKAPSFRHEAYEAYKAGRAPTPEDFPRQLALMKELVDLLGLERLEVPGFEADDVLATLAKKAEREGYEVQILTADRDLFQLLSPRISVLHPEGHRITPEWLWEKYGLRPEQWVDFRALAGDPSDNIPGVKGIGEKTALKLLKEWGSLENLLKNLDQVKPESVREKILAHLEDLKLSRELSRVRTDLPLEVDFGRRREPDWEGLKAFLERLEFGSLLHEFGLLESPLLAEEAPWPPPEGAFLGYRLSRPEPMWAELLALAASAQGRVYRAEDPHGALRGLFEVRGLLAKDLAVVALREGLDLPPTDDPMLLAYLLDPSNTTPEGEARRYGGEWTEDAAKRALLAERLHENLLGRLQGEERLLWLYEEVEKPLSRVLAHMEATGVKLDVAYLENLSLEVAAHMRRLEEEVFRLAGRSFRLNSRDQLERVLFDELGLPPIGKTEKTGKRSTSAAVLEALREVHPIVDKILQYREMAKLKGTYIDRLPALVHPKTGRLHTRFNQTATATGRLSSSDPNLQNIPVRTPLGQKIRRAFVAEEGWRLVALDYRQIELRVLAHLSGDENLIRVFQEGKDIHTQTASWMFGLSAEAIDPLMRRAAKTINFGVLYGMSAFRLSQELGIPYEEAQAFIQKYFQSYPKVKAWIEKTLREGRTRGYVETLFGRRRYVPDLNARVKGKREAAERMAFNMPVQGTAADLMKLAMVRLFPQLREVGARMLLQVHDELLLEAPKERAEEVAALAKEVMEGVWPLAVPLEVEVGIGEDWLAAKG

SEQ ID NO: 6131 - DNA, 2523 bp, synthetic construct
  misc_feature 1..2523: note = Variant of DNA polymerase I from Thermus sp. strain 2.9
  source 1..2523: mol_type = other DNA
atgcaccatcatcatcatcatggcggtagcggcgtgttaccggtgttcgagcctaaaggtcgcgtgcttctggttgatggccatcatctcgcgtatcgtaacttctttgccctgaaaggattaaccaccagcctgggcgagccggtacagggtgtctacggctttgcaaagtcgctcctgaaagctctgaaagaagacggtgatgtggtgattgttgtctttgatgcgaaagcgccaagttttcgccacgaagcgtacgaagcttacaaagccgggcgtgctccaacgccggaagactttcctcgccaattggcgcttatgaaggaattagtggatttgcttggcctcgaacgcttggaagttcccggtttcgaggcagacgacgtattagcgactctcgcaaagaaagccgaacgtgagggctatgaagtccagatcttgacagcagatcgcgatcttttccagcttttatctccgcgcatctcggtgttacacccggaagggcatcgtatcaccccggaatggctctgggagaaatatggtttgcgtcccgaacaatgggtggattttcgcgccttagcaggcgatccgagcgacaatattccgggagttaaaggtatcggcgagaagacggcgctcaagctccttaaagaatgggggtcgttggagaacttgcttaagaatttagatcaggtcaaaccagagtcagtgcgtgagaagattcttgctcacctcgaagacctcaaattaagccgcgaattgtcccgtgtacgcaccgatttgccgctcgaagttgatttcggtcgccgccgcgaacctgactgggagggtcttaaagcgtttttagagcgtcttgaatttggttcgctcttgcatgaattcggccttttagaaagcccgttactggccgaagaagcaccttggccaccgcccgagggcgcgtttttaggttaccgtttgagtcgcccggaaccgatgtgggccgaattactggctcttgcagcgtctgcccagggacgtgtgtatcgcgcggaagaccctcatggtgcgctccgcggcctcttcgaagtccgtggactccttgccaaagacttagctgttgttgcattgcgcgaaggtcttgatttacctccgactgatgatccaatgcttcttgcgtacctcttggacccgtcaaacacgacgcccgaaggcgtagcccgtcgttacggcggcgagtggaccgaagatgcagcgaaacgcgcgttattggccgaacgtttgcacgaaaatttattaggacgtttgcaaggcgaggaacgtctcctctggctttacgaagaagtggagaaaccattgagtcgcgtgctcgcgcatatggaagctaccggtgtcaaattagacgtggcgtatttggagaatctcagccttgaagttgctgcccacatgcgccgcttggaggaagaagtattccgtttagcaggccgttcctttcgccttaactctcgcgatcagttagaacgtgtgttgttcgatgaacttggtctccctcctatcggcaagacagagaagaccggtaaacgtagcacttcagcggcggttttagaagctcttcgcgaagtccatcccattgtggacaagatcttgcagtaccgcgaaatggcgaaattgaaaggcacctatattgaccgtcttccggcattagtccacccgaaaacgggacgcctccatacccgcttcaaccaaacagccacggcgaccggtcgtttgtcctcctctgatccaaaccttcagaatattccagtacgtaccccattgggccagaagatccgccgtgcgtttgtagctgaggagggttggcgtttagtggccctcgattatcgtcaaattgaattacgtgtccttgcccatctttctggcgatgagaacctcatccgcgtgtttcaggaaggcaaagacattcacactcaaacggcaagctggatgtttggattatcagctgaagcgatcgatcctttgatgcgtcgtgcagcgaagaccatcaatttcggtgttctctacggtatgagtgcctttcgtttgtcgcaggaattaggcattccctatgaagaagctcaggcgttcattcagaaatactttcaaagctatcccaaagttaaagcatggatcgagaagactctccgtgaaggccgcacacgtggttacgtagagaccttatttggacgtcgccgctatgttcccgatttaaacgctcgcgtgaaaggcaagcgtgaagccgccgaacgcatggcgttcaacatgcctgtacagggcacggcagctgacctcatgaaacttgcaatggtgcgcctttttccacaattgcgtgaagttggtgcccgcatggagttgcaggtccacgatgaactcttgttagaagcgccaaaagagcgtgcggaagaggtggcagccctcgcgaaagaagttatggaaggcgtgtggcccttagcggtgcctcttgaagtcgaagttggtattggcgaggattggctggctgccaaagga

SEQ ID NO: 6132 - protein, 841 aa, synthetic construct
  REGION 1..841: note = Variant of DNA polymerase I from Thermus sp. strain 2.9
MHHHHHHGGSGVLPVFEPKGRVLLVDGHHLAYRNFFALKGLTTSLGEPVQGVYGFAKSLLKALKEDGDVVIVVFDAKAPSFRHEAYEAYKAGRAPTPEDFPRQLALMKELVDLLGLERLEVPGFEADDVLATLAKKAEREGYEVQILTADRDLFQLLSPRISVLHPEGHRITPEWLWEKYGLRPEQWVDFRALAGDPSDNIPGVKGIGEKTALKLLKEWGSLENLLKNLDQVKPESVREKILAHLEDLKLSRELSRVRTDLPLEVDFGRRREPDWEGLKAFLERLEFGSLLHEFGLLESPLLAEEAPWPPPEGAFLGYRLSRPEPMWAELLALAASAQGRVYRAEDPHGALRGLFEVRGLLAKDLAVVALREGLDLPPTDDPMLLAYLLDPSNTTPEGVARRYGGEWTEDAAKRALLAERLHENLLGRLQGEERLLWLYEEVEKPLSRVLAHMEATGVKLDVAYLENLSLEVAAHMRRLEEEVFRLAGRSFRLNSRDQLERVLFDELGLPPIGKTEKTGKRSTSAAVLEALREVHPIVDKILQYREMAKLKGTYIDRLPALVHPKTGRLHTRFNQTATATGRLSSSDPNLQNIPVRTPLGQKIRRAFVAEEGWRLVALDYRQIELRVLAHLSGDENLIRVFQEGKDIHTQTASWMFGLSAEAIDPLMRRAAKTINFGVLYGMSAFRLSQELGIPYEEAQAFIQKYFQSYPKVKAWIEKTLREGRTRGYVETLFGRRRYVPDLNARVKGKREAAERMAFNMPVQGTAADLMKLAMVRLFPQLREVGARMELQVHDELLLEAPKERAEEVAALAKEVMEGVWPLAVPLEVEVGIGEDWLAAKG

SEQ ID NO: 6133 - DNA, 2523 bp, synthetic construct
  misc_feature 1..2523: note = Variant of DNA polymerase I from Thermus sp. strain 2.9
  source 1..2523: mol_type = other DNA
atgcaccatcatcatcatcatggcggtagcggcgtgttaccggtgttcgagcctaaaggtcgcgtgcttctggttgatggccatcatctcgcgtatcgtaacttctttgccctgaaaggattaaccaccagcctgggcgagccggtacagggtgtctacggctttgcaaagtcgctcctgaaagctctgaaagaagacggtgatgtggtgattgttgtctttgatgcgaaagcgccaagttttcgccacgaagcgtacgaagcttacaaagccgggcgtgctccaacgccggaagactttcctcgccaattggcgcttatgaaggaattagtggatttgcttggcctcgaacgcttggaagttcccggtttcgaggcagacgacgtattagcgactctcgcaaagaaagccgaacgtgagggctatgaagtccagatcttgacagcagatcgcgatcttttccagcttttatctccgcgcatctcggtgttacacccggaagggcatcgtatcaccccggaatggctctgggagaaatatggtttgcgtcccgaacaatgggtggattttcgcgccttagcaggcgatccgagcgacaatattccgggagttaaaggtatcggcgagaagacggcgctcaagctccttaaagaatgggggtcgttggagaacttgcttaagaatttagatcaggtcaaaccagagtcagtgcgtgagaagattcttgctcacctcgaagacctcaaattaagccgcgaattgtcccgtgtacgcaccgatttgccgctcgaagttgatttcggtcgccgccgcgaacctgactgggagggtcttaaagcgtttttagagcgtcttgaatttggttcgctcttgcatgaattcggccttttagaaagcccgttactggccgaagaagcaccttggccaccgcccgagggcgcgtttttaggttaccgtttgagtcgcccggaaccgatgtgggccgaattactggctcttgcagcgtctgcccagggacgtgtgtatcgcgcggaagaccctcatggtgcgctccgcggcctcttcgaagtccgtggactccttgccaaagacttagctgttgttgcattgcgcgaaggtcttgatttacctccgactgatgatccaatgcttcttgcgtacctcttggacccgtcaaacacgacgcccgaaggcgtagcccgtcgttacggcggcgagtggaccgaagatgcagcgaaacgcgcgttattggccgaacgtttgcacgaaaatttattaggacgtttgcaaggcgaggaacgtctcctctggctttacgaagaagtggagaaaccattgagtcgcgtgctcgcgcatatggaagctaccggtgtcaaattagacgtggcgtatttggagaatctcagccttgaagttgctgcccacatgcgccgcttggaggaagaagtattccgtttagcaggccgttcctttcgccttaactctcgcgatcagttagaacgtgtgttgttcgatgaacttggtctccctcctatcggcaagacagagaagaccggtaaacgtagcacttcagcggcggttttagaagctcttcgcgaagtccatcccattgtggacaagatcttgcagtaccgcgaaatggcgaaattgaaaggcacctatattgaccgtcttccggcattagtccacccgaaaacgggacgcctccatacccgcttcaaccaaacagccacggcgaccggtcgtttgtcctcctctgatccaaaccttcagaatattccagtacgtaccccattgggccagaagatccgccgtgcgtttgtagctgaggagggttggcgtttagtggccctcgattatcgtcaaattgaattacgtgtccttgcccatctttctggcgatgagaacctcatccgcgtgtttcaggaaggcaaagacattcacactcaaacggcaagctggatgtttggattatcagctgaagcgatcgatcctttgatgcgtcgtgcagcgaagaccatcaatttcggtgttctctacggtatgagtgcctttcgtttgtcgcaggaattaggcattccctatgaagaagctcaggagttcattcagaaatactttcaaagctatcccaaagttaaagcatggatcgagaagactctccgtgaaggccgcacacgtggttacgtagagaccttatttggacgtcgccgctatgttcccgatttaaacgctcgcgtgaaaggcaagcgtgaagccgccgaacgcatggcgttcaacatgcctgtacagggcacggcagctgacctcatgaaacttgcaatggtgcgcctttttccacaattgcgtgaagttggtgcccgcatgctcttgcaggtccacgatgaactcttgttagaagcgccaaaagagcgtgcggaagaggtggcagccctcgcgaaagaagttatggaaggcgtgtggcccttagcggtgcctcttgaagtcgaagttggtattggcgaggattggctggctgccaaagga

SEQ ID NO: 6134 - protein, 841 aa, synthetic construct
  REGION 1..841: note = Variant of DNA polymerase I from Thermus sp. strain 2.9
MHHHHHHGGSGVLPVFEPKGRVLLVDGHHLAYRNFFALKGLTTSLGEPVQGVYGFAKSLLKALKEDGDVVIVVFDAKAPSFRHEAYEAYKAGRAPTPEDFPRQLALMKELVDLLGLERLEVPGFEADDVLATLAKKAEREGYEVQILTADRDLFQLLSPRISVLHPEGHRITPEWLWEKYGLRPEQWVDFRALAGDPSDNIPGVKGIGEKTALKLLKEWGSLENLLKNLDQVKPESVREKILAHLEDLKLSRELSRVRTDLPLEVDFGRRREPDWEGLKAFLERLEFGSLLHEFGLLESPLLAEEAPWPPPEGAFLGYRLSRPEPMWAELLALAASAQGRVYRAEDPHGALRGLFEVRGLLAKDLAVVALREGLDLPPTDDPMLLAYLLDPSNTTPEGVARRYGGEWTEDAAKRALLAERLHENLLGRLQGEERLLWLYEEVEKPLSRVLAHMEATGVKLDVAYLENLSLEVAAHMRRLEEEVFRLAGRSFRLNSRDQLERVLFDELGLPPIGKTEKTGKRSTSAAVLEALREVHPIVDKILQYREMAKLKGTYIDRLPALVHPKTGRLHTRFNQTATATGRLSSSDPNLQNIPVRTPLGQKIRRAFVAEEGWRLVALDYRQIELRVLAHLSGDENLIRVFQEGKDIHTQTASWMFGLSAEAIDPLMRRAAKTINFGVLYGMSAFRLSQELGIPYEEAQEFIQKYFQSYPKVKAWIEKTLREGRTRGYVETLFGRRRYVPDLNARVKGKREAAERMAFNMPVQGTAADLMKLAMVRLFPQLREVGARMLLQVHDELLLEAPKERAEEVAALAKEVMEGVWPLAVPLEVEVGIGEDWLAAKG

SEQ ID NO: 6135 - DNA, 2523 bp, synthetic construct
  misc_feature 1..2523: note = Variant of DNA polymerase I from Thermus sp. strain 2.9
  source 1..2523: mol_type = other DNA
atgcaccatcatcatcatcatggcggtagcggcgtgttaccggtgttcgagcctaaaggtcgcgtgcttctggttgatggccatcatctcgcgtatcgtaacttctttgccctgaaaggattaaccaccagcctgggcgagccggtacagggtgtctacggctttgcaaagtcgctcctgaaagctctgaaagaagacggtgatgtggtgattgttgtctttgatgcgaaagcgccaagttttcgccacgaagcgtacgaagcttacaaagccgggcgtgctccaacgccggaagactttcctcgccaattggcgcttatgaaggaattagtggatttgcttggcctcgaacgcttggaagttcccggtttcgaggcagacgacgtattagcgactctcgcaaagaaagccgaacgtgagggctatgaagtccagatcttgacagcagatcgcgatcttttccagcttttatctccgcgcatctcggtgttacacccggaagggcatcgtatcaccccggaatggctctgggagaaatatggtttgcgtcccgaacaatgggtggattttcgcgccttagcaggcgatccgagcgacaatattccgggagttaaaggtatcggcgagaagacggcgctcaagctccttaaagaatgggggtcgttggagaacttgcttaagaatttagatcaggtcaaaccagagtcagtgcgtgagaagattcttgctcacctcgaagacctcaaattaagccgcgaattgtcccgtgtacgcaccgatttgccgctcgaagttgatttccgccgccgccgcgaacctgactgggagggtcttaaagcgtttttagagcgtcttgaatttggttcgctcttgcatgaattcggccttttagaaagcccgttactggccgaagaagcaccttggccaccgcccgagggcgcgtttttaggttaccgtttgagtcgcccggaaccgatgtgggccgaattactggctcttgcagcgtctgcccagggacgtgtgtatcgcgcggaagaccctcatggtgcgctccgcggcctcttcgaagtccgtggactccttgccaaagacttagctgttgttgcattgcgcgaaggtcttgatttacctccgactgatgatccaatgcttcttgcgtacctcttggacccgtcaaacacgacgcccgaaggcgtagcccgtcgttacggcggcgagtggaccgaagatgcagcgaaacgcgcgttattggccgaacgtttgcacgaaaatttattaggacgtttgcaaggcgaggaacgtctcctctggctttacgaagaagtggagaaaccattgagtcgcgtgctcgcgcatatggaagctaccggtgtcaaattagacgtggcgtatttggaggcccttcaccttgaagttgctgccgaaatgcgccgcttggaggaagaagtattccgtttagcaggccgctcctttcgccttaactctcgcgatcagttagaacgtgtgttgttcgatgaacttggtctccctcctatcggcaagacagagaagaccggtaaacgtagcacttcagcggcggttttagaagctcttcgcgaagtccatcccattgtggacaagatcttgcagtaccgcgaaatggcgaaattgaaaggcacctatattgaccgtcttccggcattagtccacccgaaaacgggacgcctccatacccgcttcaaccaaacagccacggcgaccggtcgtttgtcctcctctgatccaaaccttcagaatattccagtacgtaccccattgggccagaagatccgccgtgcgtttgtagctgaggagggttggcgtttagtggccctcgattatcgtcaaattgaattacgtgtccttgcccatctttctggcgatgagaacctcatccgcgtgtttcaggaaggcaaagacattcacactcaaacggcaagctggatgtttggattatcagctgaagcgatcgatcctttgatgcgtcgtgcagcgaagaccatcaatttcggtgttctctacggtatgagtgcctttcgtttgtcgcaggaattaggcattccctatgaagaagctcaggcgttcattcagaaatactttcaaagctatcccaaagttaaagcatggatcgagaagactctccgcgaaggccgcacacgtggttacgtagagaccttatttggacgtcgccgctatgttcccgatttaaacgctcgcgtgaaaggcaaacgtgaagccgccgaacgcatggcgttcaacatgcctgtacagggcacggcagctgacctcatgaaacttgcaatggtgcgcctttttccacaattgcgtgaagttggtgcccgcatgctcttgcaggtccacgatgaactcttgttagaagcgccaaaagagcgtgcggaagaggtggcagccctcgcgaaagaagttatggaaggcgtgtggcccttagcggtgcctcttgaagtcgaagttggtattggcgaggattggctggctgccaaagga

SEQ ID NO: 6136 - protein, 841 aa, synthetic construct
  REGION 1..841: note = Variant of DNA polymerase I from Thermus sp. strain 2.9
MHHHHHHGGSGVLPVFEPKGRVLLVDGHHLAYRNFFALKGLTTSLGEPVQGVYGFAKSLLKALKEDGDVVIVVFDAKAPSFRHEAYEAYKAGRAPTPEDFPRQLALMKELVDLLGLERLEVPGFEADDVLATLAKKAEREGYEVQILTADRDLFQLLSPRISVLHPEGHRITPEWLWEKYGLRPEQWVDFRALAGDPSDNIPGVKGIGEKTALKLLKEWGSLENLLKNLDQVKPESVREKILAHLEDLKLSRELSRVRTDLPLEVDFRRRREPDWEGLKAFLERLEFGSLLHEFGLLESPLLAEEAPWPPPEGAFLGYRLSRPEPMWAELLALAASAQGRVYRAEDPHGALRGLFEVRGLLAKDLAVVALREGLDLPPTDDPMLLAYLLDPSNTTPEGVARRYGGEWTEDAAKRALLAERLHENLLGRLQGEERLLWLYEEVEKPLSRVLAHMEATGVKLDVAYLEALHLEVAAEMRRLEEEVFRLAGRSFRLNSRDQLERVLFDELGLPPIGKTEKTGKRSTSAAVLEALREVHPIVDKILQYREMAKLKGTYIDRLPALVHPKTGRLHTRFNQTATATGRLSSSDPNLQNIPVRTPLGQKIRRAFVAEEGWRLVALDYRQIELRVLAHLSGDENLIRVFQEGKDIHTQTASWMFGLSAEAIDPLMRRAAKTINFGVLYGMSAFRLSQELGIPYEEAQAFIQKYFQSYPKVKAWIEKTLREGRTRGYVETLFGRRRYVPDLNARVKGKREAAERMAFNMPVQGTAADLMKLAMVRLFPQLREVGARMLLQVHDELLLEAPKERAEEVAALAKEVMEGVWPLAVPLEVEVGIGEDWLAAKG

SEQ ID NO: 6137 - DNA, 2523 bp, synthetic construct
  misc_feature 1..2523: note = Variant of DNA polymerase I from Thermus sp. strain 2.9
  source 1..2523: mol_type = other DNA
atgcaccatcatcatcatcatggcggtagcggcgtgttaccggtgttcgagcctaaaggtcgcgtgcttctggttgatggccatcatctcgcgtatcgtaacttctttgccctgaaaggattaaccaccagccgcggcgagccggtacagggtgtctacggctttgcaaagtcgctcctgaaagctctgaaagaagacggtgatgtggtgattgttgtctttgatgcgaaagcgccaagttttcgccacgaagcgtacgaagcttacaaagccgggcgtgctccaacgccggaagactttcctcgccaattggcgcttatgaaggaattagtggatttgcttggcctcgaacgcttggaagttcccggtttcgaggcagacgacgtattagcgactctcgcaaagaaagccgaacgtgagggctatgaagtccagatcttgacagcagatcgcgatcttttccagcttttatctccgcgcatctcggtgttacacccggaagggcatcgtatcaccccggaatggctctgggagaaatatggtttgcgtcccgaacaatgggtggattttcgcgccttagcaggcgatccgagcgacaatattccgggagttaaaggtatcggcgagaagacggcgctcaagctccttaaagaatgggggtcgttggagaacttgcttaagaatttagatcaggtcaaaccagagtcagtgcgtgagaagattcttgctcacctcgaagacctcaaattaagccgcgaattgtcccgtgtacgcaccgatttgccgctcgaagttgatttcggccgccgccgcgaacctgactgggagggtcttaaagcgtttttagagcgtcttgaatttggttcgctcttgcatgaattcggccttttagaaagcccgttactggccgaagaagcaccttggccaccgcccgagggcgcgtttttaggttaccgtttgagtcgcccggaaccgatgtgggccgaattactggctcttgcagcgtctgcccagggacgtgtgtatcgcgcggaagaccctcatggtgcgctccgcggcctcttcgaagtccgtggactccttgccaaagacttagctgttgttgcattgcgcgaaggtcttgatttacctccgactgatgatccaatgcttcttgcgtacctcttggacccgtcaaacacgacgcccgaaggcgtagcccgtcgttacggcggcgagtggaccgaagatgcagcgaaacgcgcgttattggccgaacgtttgcacgaaaatttattaggacgtttgcaaggcgaggaacgtctcctctggctttacgaagaagtggagaaaccattgagtcgcgtgctcgcgcatatggaagctaccggtgtcaaattagacgtggcgtatttggagaatctcagccttgaagttgctgcccacatgcgccgcttggaggaagaagtattccgtttagcaggccgttcctttcgccttaactctcgcgatcagttagaacgtgtgttgttcgatgaacttggtctccctcctatcggcaagacagagaagaccggtaaacgtagcacttcagcggcggttttagaagctcttcgcgaagtccatcccattgtggacaagatcttgcagtaccgcgaaatggcgaaattgaaaggcacctatattgaccctcttccggcattagtccacccgaaaacgggacgcctccatacccgcttcaaccaaacagccacggcgaccggtcgtttgtcctcctctgatccaaaccttcagaatattccagtacgtaccccattgggccagaagatccgccgtgcgtttgtagctgaggagggttggcgtttagtggccctcgattatcgtcaaattgaattacgtgtccttgcccatctttctggcgatgagaacctcatccgcgtgtttcaggaaggcaaagacattcacactcaaacggcaagctggatgtttggattatcagctgaagcgatcgatcctttgatgcgtcgtgcagcgaagaccatcaatttcggtgttctctacggtatgagtgcctttcgtttgtcgcaggaattaggcattccctatgaagaagctcaggcgttcattcagaaatactttcaaagctatcccaaagttaaagcatggatcgagaagactctccgtgaaggccgcacacgtggttacgtagagaccttatttggacgtcgccgctatgttcccgatttaaacgctcgcgtgaaaggcaaacgtgaagccgccgaacgcatggcgttcaacatgcctgtacagggcacggcagctgacctcatgaaacttgcaatggtgcgcctttttccacaattgcgtgaagttggtgcccgcatgctcttgcaggtccacgatgaactcttgttagaagcgccaaaagagcgtgcggaagaggtggcagccctcgcgaaagaagttatggaaggcgtgtggcccttagcggtgcctcttgaagtcgaagttggtattggcgaggattggctggctgccaaagga

SEQ ID NO: 6138 - protein, 841 aa, synthetic construct
  REGION 1..841: note = Variant of DNA polymerase I from Thermus sp. strain 2.9
MHHHHHHGGSGVLPVFEPKGRVLLVDGHHLAYRNFFALKGLTTSRGEPVQGVYGFAKSLLKALKEDGDVVIVVFDAKAPSFRHEAYEAYKAGRAPTPEDFPRQLALMKELVDLLGLERLEVPGFEADDVLATLAKKAEREGYEVQILTADRDLFQLLSPRISVLHPEGHRITPEWLWEKYGLRPEQWVDFRALAGDPSDNIPGVKGIGEKTALKLLKEWGSLENLLKNLDQVKPESVREKILAHLEDLKLSRELSRVRTDLPLEVDFGRRREPDWEGLKAFLERLEFGSLLHEFGLLESPLLAEEAPWPPPEGAFLGYRLSRPEPMWAELLALAASAQGRVYRAEDPHGALRGLFEVRGLLAKDLAVVALREGLDLPPTDDPMLLAYLLDPSNTTPEGVARRYGGEWTEDAAKRALLAERLHENLLGRLQGEERLLWLYEEVEKPLSRVLAHMEATGVKLDVAYLENLSLEVAAHMRRLEEEVFRLAGRSFRLNSRDQLERVLFDELGLPPIGKTEKTGKRSTSAAVLEALREVHPIVDKILQYREMAKLKGTYIDPLPALVHPKTGRLHTRFNQTATATGRLSSSDPNLQNIPVRTPLGQKIRRAFVAEEGWRLVALDYRQIELRVLAHLSGDENLIRVFQEGKDIHTQTASWMFGLSAEAIDPLMRRAAKTINFGVLYGMSAFRLSQELGIPYEEAQAFIQKYFQSYPKVKAWIEKTLREGRTRGYVETLFGRRRYVPDLNARVKGKREAAERMAFNMPVQGTAADLMKLAMVRLFPQLREVGARMLLQVHDELLLEAPKERAEEVAALAKEVMEGVWPLAVPLEVEVGIGEDWLAAKG

SEQ ID NO: 6139 - DNA, 2523 bp, synthetic construct
  misc_feature 1..2523: note = Variant of DNA polymerase I from Thermus sp. strain 2.9
  source 1..2523: mol_type = other DNA
atgcaccatcatcatcatcatggcggtagcggcgtgttaccggtgttcgagcctaaaggtcgcgtgcttctggttgatggccatcatctcgcgtatcgtaacttctttgccctgaaaggattaaccaccagcctgggcgagccggtacagggtgtctacggctttgcaaagtcgctcctgaaagctctgaaagaagacggtgatgtggtgattgttgtctttgatgcgaaagcgccaagttttcgccacgaagcgtacgaagcttacaaagccgggcgtgctccaacgccggaagactttcctcgccaattggcgcttatgaaggaattagtggatttgcttggcctcgaacgcttggaagttcccggtttcgaggcagacgacgtattagcgactctcgcaaagaaagccgaacgtgagggctatgaagtccagatcttgacagcagatcgcgatcttttccagcttttatctccgcgcatctcggtgttacacccggaagggcatcgtatcaccccggaatggctctgggagaaatatggtttgcgtcccgaacaatgggtggattttcgcgccttagcaggcgatccgagcgacaatattccgggagttaaaggtatcggcgagaagacggcgctcaagctccttaaagaatgggggtcgttggagaacttgcttaagaatttagatcaggtcaaaccagagtcagtgcgtgagaagattcttgctcacctcgaagacctcaaattaagccgcgaattgtcccgtgtacgcaccgatttgccgctcgaagttgatttcggtcgccgccgcgaacctgactgggagggtcttaaagcgtttttagagcgtcttgaatttggttcgctcttgcatgaattcggccttttagaaagcccgttactggccgaagaaaggccttggccaccgcccgagggcgcgtttttaggttaccgtttgagtcgcccggaaccgatgtgggccgaattactggctcttgcagcgtctgcccagggacgtgtgtatcgcgcggaagaccctcatggtgcgctccgcggcctcttcgaagtccgtggactccttgccaaagacttagctgttgttgcattgcgcgaaggtcttgatttacctccgactgatgatccaatgcttcttgcgtacctcttggacccgtcaaacacgacgcccgaaggcgtagcccgtcgttacggcggcgagtggaccgaagatgcagcgaaacgcgcgttattggccgaacgtttgcacgaaaatttattaggacgtttgcaaggcgaggaacgtctcctctggctttacgaagaagtggagaaaccattgagtcgcgtgctcgcgcatatggaagctaccggtgtcaaattagacgtggcgtatttggagaatctcagccttgaagttgctgcccacatgcgccgcttggaggaagaagtattccgtttagcaggccgttcctttcgccttaactctcgcgatcagttagaacgtgtgttgttcgatgaacttggtctccctcctatcggcaagacagagaagaccggtaaacgtagcacttcagcggcggttttagaagctcttcgcgaagtccatcccattgtggacaagatcttgcagtaccgcgaaatggcgaaattgaaaggcacctatattgaccgtcttccggcattagtccacccgaaaacgggacgcctccatacccgcttcaaccaaacagccacggcgaccggtcgtttgtcctcctctgatccaaaccttcagaatattccagtacgtaccccattgggccagaagatccgccgtgcgtttgtagctgaggagggttggcgtttagtggccctcgattatcgtcaaattgaattacgtgtccttgcccatctttctggcgatgagaacctcatccgcgtgtttcaggaaggcaaagacattcacactcaaacggcaagctggatgtttggattatcagctgaagcgatcgatcctttgatgcgtcgtgcagcgaagaccatcaatttcggtgttctctacggtatgagtgcctttcgtttgtcgcaggaattaggcattccctatgaagaagctcaggcgttcattcagaaatactttcaaagctatcccaaagttaaagcatggatcgagaagactctccgtgaaggccgcacacgtggttacgtagagaccttatttggacgtcgccgctatgttcccgatttaaacgctcgcgtgaaaggcaagcgtgaagccgccgaacgcatggcgttcaacatgcctgtacagggcacggcagctgacctcatgaaacttgcaatggtgcgcctttttccacaattgcgtgaagttggtgcccgcatgctcttgcaggtccacgatgaactcttgttagaagcgccaaaagagcgtgcggaagaggtggcagccctcgcgaaagaagttatggaaggcgtgtggcccttagcggtgcctcttgaagtcgaagttggtattggcgaggattggctggctgccaaagga

SEQ ID NO: 6140 - protein, 841 aa, synthetic construct
  REGION 1..841: note = Variant of DNA polymerase I from Thermus sp. strain 2.9
MHHHHHHGGSGVLPVFEPKGRVLLVDGHHLAYRNFFALKGLTTSLGEPVQGVYGFAKSLLKALKEDGDVVIVVFDAKAPSFRHEAYEAYKAGRAPTPEDFPRQLALMKELVDLLGLERLEVPGFEADDVLATLAKKAEREGYEVQILTADRDLFQLLSPRISVLHPEGHRITPEWLWEKYGLRPEQWVDFRALAGDPSDNIPGVKGIGEKTALKLLKEWGSLENLLKNLDQVKPESVREKILAHLEDLKLSRELSRVRTDLPLEVDFGRRREPDWEGLKAFLERLEFGSLLHEFGLLESPLLAEERPWPPPEGAFLGYRLSRPEPMWAELLALAASAQGRVYRAEDPHGALRGLFEVRGLLAKDLAVVALREGLDLPPTDDPMLLAYLLDPSNTTPEGVARRYGGEWTEDAAKRALLAERLHENLLGRLQGEERLLWLYEEVEKPLSRVLAHMEATGVKLDVAYLENLSLEVAAHMRRLEEEVFRLAGRSFRLNSRDQLERVLFDELGLPPIGKTEKTGKRSTSAAVLEALREVHPIVDKILQYREMAKLKGTYIDRLPALVHPKTGRLHTRFNQTATATGRLSSSDPNLQNIPVRTPLGQKIRRAFVAEEGWRLVALDYRQIELRVLAHLSGDENLIRVFQEGKDIHTQTASWMFGLSAEAIDPLMRRAAKTINFGVLYGMSAFRLSQELGIPYEEAQAFIQKYFQSYPKVKAWIEKTLREGRTRGYVETLFGRRRYVPDLNARVKGKREAAERMAFNMPVQGTAADLMKLAMVRLFPQLREVGARMLLQVHDELLLEAPKERAEEVAALAKEVMEGVWPLAVPLEVEVGIGEDWLAAKG

SEQ ID NO: 6141 - DNA, 2523 bp, synthetic construct
  misc_feature 1..2523: note = Variant of DNA polymerase I from Thermus sp. strain 2.9
  source 1..2523: mol_type = other DNA
atgcaccatcatcatcatcatggcggtagcggcgtgttaccggtgttcgagcctaaaggtcgcgtgcttctggttgatggccatcatctcgcgtatcgtaacttctttgccctgaaaggattaaccaccagcctgggcgagccggtacagggtgtctacggctttgcaaagtcgctcctgaaagctctgaaagaagacggtgatgtggtgattgttgtctttgatgcgaaagcgccaagttttcgccacgaagcgtacgaagcttacaaagccgggcgtgctccaacgccggaagactttcctcgccaattggcgcttatgaaggaattagtggatttgcttggcctcgaacgcttggaagttcccggtttcgaggcagacgacgtattagcgactctcgcaaagaaagccgaacgtgagggctatgaagtccagatcttgacagcagatcgcgatcttttccagcttttatctccgcgcatctcggtgttacacccggaagggcatcgtatcaccccggaatggctctgggagaaatatggtttgcgtcccgaacaatgggtggattttcgcgccttagcaggcgatccgagcgacaatattccgggagttaaaggtatcggcgagaagacggcgctcaagctccttaaagaatgggggtcgttggagaacttgcttaagaatttagatcaggtcaaaccagagtcagtgcgtgagaagattcttgctcacctcgaagacctcaaattaagccgcgaattgtcccgtgtacgcaccgatttgccgctcgaagttgatttcggtcgccgccgcgaacctgactgggagggtcttaaagcgtttttagagcgtcttgaatttggttcgctcttgcatgaattcggccttttagaaagcccgttactggccgaagaagcaccttggccaccgcccgagggcgcgtttttaggttaccgtttgagtcgcccggaaccgatgtgggccgaattactggctcttgcagcgtctgcccagggacgtgtgtatcgcgcggaagaccctcatggtgcgctccgcggcctcttcgaagtccgtggactccttgccaaagacttagctgttgttgcattgcgcgaaggtcttgatttacctccgactgatgatccaatgcttcttgcgtacctcttggacccgtcaaacacgacgcccgaaggcgtagcccgtcgttacggcggcgagtggaccgaagatgcagcgaaacgcgcgttattggccgaacgtttgcacgaaaatttattaggacgtttgcaaggcgaggaacgtctcctctggctttacgaagaagtggagaaaccattgagtcgcgtgctcgcgcatatggaagctaccggtgtcaaattagacgtggcgtatttggagaatctcagccttgaagttgctgcccacatgcgccgcttggaggaagaagtattccgtttagcaggccgttcctttcgccttaactctcgcgatcagttagaacgtgtgttgttcgatgaacttggtctccctcctatcggcaagacagagaagaccggtaaacgtagcacttcagcggcggttttagaagctcttcgcgaagtccatcccattgtggacaagatcttgcagtaccgcgaaatggcgaaattgaaaggcacctatattgaccgtcttccggcattagtccacccgaaaacgggacgcctccatacccgcttcaaccaaacagccacggcgaccggtcgtttgtcctcctctgatccaaaccttcagaatattccagtacgtaccccattgggccagaagatccgccgtgcgtttgtagctgaggagggttggcgtttagtggccctcgattatcgtcaaattgaattacgtgtccttgccacgctttctggcgatgagaacctcatccgcgtgtttcaggaaggcaaagacattcacactcaaacggcaagctggatgtttggattatcagctgaagcgatcgatcctttgatgcgtcgtgcagcgaagaccatcaatttcggtgttctctacggtatgagtgcctttcgtttgtcgcaggaattaggcattccctatgaagaagctcaggcgttcattcagaaatactttcaaagctatcccaaagttaaagcatggatcgagaagactctccgtgaaggccgcacacgtggttacgtagagaccttatttggacgtcgccgctatgttcccgatttaaacgctcgcgtgaaaggcaagcgtgaagccgccgaacgcatggcgttcaacatgcctgtacagggcacggcagctgacctcatgaaacttgcaatggtgcgcctttttccacaattgcgtgaagttggtgcccgcatgctcttgcaggtccacgatgaactcttgttagaagcgccaaaagagcgtgcggaagaggtggcagccctcgcgaaagaagttatggaaggcgtgtggcccttagcggtgcctcttgaagtcgaagttggtattggcgaggattggctggctgccaaagga

SEQ ID NO: 6142 - protein, 841 aa, synthetic construct
  REGION 1..841: note = Variant of DNA polymerase I from Thermus sp. strain 2.9
MHHHHHHGGSGVLPVFEPKGRVLLVDGHHLAYRNFFALKGLTTSLGEPVQGVYGFAKSLLKALKEDGDVVIVVFDAKAPSFRHEAYEAYKAGRAPTPEDFPRQLALMKELVDLLGLERLEVPGFEADDVLATLAKKAEREGYEVQILTADRDLFQLLSPRISVLHPEGHRITPEWLWEKYGLRPEQWVDFRALAGDPSDNIPGVKGIGEKTALKLLKEWGSLENLLKNLDQVKPESVREKILAHLEDLKLSRELSRVRTDLPLEVDFGRRREPDWEGLKAFLERLEFGSLLHEFGLLESPLLAEEAPWPPPEGAFLGYRLSRPEPMWAELLALAASAQGRVYRAEDPHGALRGLFEVRGLLAKDLAVVALREGLDLPPTDDPMLLAYLLDPSNTTPEGVARRYGGEWTEDAAKRALLAERLHENLLGRLQGEERLLWLYEEVEKPLSRVLAHMEATGVKLDVAYLENLSLEVAAHMRRLEEEVFRLAGRSFRLNSRDQLERVLFDELGLPPIGKTEKTGKRSTSAAVLEALREVHPIVDKILQYREMAKLKGTYIDRLPALVHPKTGRLHTRFNQTATATGRLSSSDPNLQNIPVRTPLGQKIRRAFVAEEGWRLVALDYRQIELRVLATLSGDENLIRVFQEGKDIHTQTASWMFGLSAEAIDPLMRRAAKTINFGVLYGMSAFRLSQELGIPYEEAQAFIQKYFQSYPKVKAWIEKTLREGRTRGYVETLFGRRRYVPDLNARVKGKREAAERMAFNMPVQGTAADLMKLAMVRLFPQLREVGARMLLQVHDELLLEAPKERAEEVAALAKEVMEGVWPLAVPLEVEVGIGEDWLAAKG

SEQ ID NO: 6143 - DNA, 2523 bp, synthetic construct
  misc_feature 1..2523: note = Variant of DNA polymerase I from Thermus sp. strain 2.9
  source 1..2523: mol_type = other DNA
atgcaccatcatcatcatcatggcggtagcggcgtgttaccggtgttcgagcctaaaggtcgcgtgcttctggttgatggccatcatctcgcgtatcgtaacttctttgccctgaaaggattaaccaccagcctgggcgagccggtacagggtgtctacggctttgcaaagtcgctcctgaaagctctgaaagaagacggtgatgtggtgattgttgtctttgatgcgaaagcgccaagttttcgccacgaagcgtacgaagcttacaaagccgggcgtgctccaacgccggaagactttcctcgccaattggcgcttatgaaggaattagtggatttgcttggcctcgaacgcttggaagttcccggtttcgaggcagacgacgtattagcgactctcgcaaagaaagccgaacgtgagggctatgaagtccagatcttgacagcagatcgcgatcttttccagcttttatctccgcgcatctcggtgttacacccggaagggcatcgtatcaccccggaatggctctgggagaaatatggtttgcgtcccgaacaatgggtggattttcgcgccttagcaggcgatccgagcgacaatattccgggagttaaaggtatcggcgagaagacggcgctcaagctccttaaagaatgggggtcgttggagaacttgcttaagaatttagatcaggtcaaaccagagtcagtgcgtgagaagattcttgctcacctcgaagacctcaaattaagccgcgaattgtcccgtgtacgcaccgatttgccgctcgaagttgatttcggtcgccgccgcgaacctgactgggagggtcttaaagcgtttttagagcgtcttgaatttggttcgctcttgcatgaattcggccttttagaaagcccgttactggccgaagaagcaccttggccaccgcccgagggcgcgtttttaggttaccgtttgagtcgcccggaaccgatgtgggccgaattactggctcttgcagcgtctgcccagggacgtgtgtatcgcgcggaagaccctcatggtgcgctccgcggcctcttcgaagtccgtggactccttgccaaagacttagctgttgttgcattgcgcgaaggtcttgatttacctccgactgatgatccaatgcttcttgtgtacctcttggacccgtcaaacacgacgcccgaaggcgtagcccgtcgttacggcggcgagtggaccgaagatgcagcgaaacgcgcgttattggccgaacgtttgcacgaaaatttattaggacgtttgcaaggcgaggaacgtctcctctggctttacgaagaagtggagaaaccattgagtcgcgtgctcgcgcatatggaagctaccggtgtcaaattagacgtggcgtatttggagaatctcagccttgaagttgctgcccacatgcgccgcttggaggaagaagtattccgtttagcaggccgttcctttcgccttaactctcgcgatcagttagaacgtgtgttgttcgatgaacttggtctccctcctatcggcaagacagagaagaccggtaaacgtagcacttcagcggcggttttagaagctcttcgcgaagtccatcccattgtggacaagatcttgcagtaccgcgaaatggcgaaattgaaaggcacctatattgaccgtcttccggcattagtccacccgaaaacgggacgcctccatacccgcttcaaccaaacagccacggcgaccggtcgtttgtcctcctctgatccaaaccttcagaatattccagtacgtaccccattgggccagaagatccgccgtgcgtttgtagctgaggagggttggcgtttagtggccctcgattatcgtcaaattgaattacgtgtccttgcccatctttctggcgatgagaacctcatccgcgtgtttcaggaaggcaaagacattcacactcaaacggcaagctggatgtttggattatcagctgaagcgatcgatcctttgatgcgtcgtgcagcgaagaccatcaatttcggtgttctctacggtatgagtgcctttcgtttgtcgcaggaattaggcattccctatgaagaagctcaggcgttcattcagaaatactttcaaagctatcccaaagttaaagcatggatcgagaagactctccgtgaaggccgcacacgtggttacgtagagaccttatttggacgtcgccgctatgttcccgatttaaacgctcgcgtgaaaggcaagcgtgaagccgccgaacgcatggcgttcaacatgcctgtacagggcacggcagctgacctcatgaaacttgcaatggtgcgcctttttccacaattgcgtgaagttggtgcccgcatgctcttgcaggtccacgatgaactcttgttagaagcgccaaaagagcgtgcggaagaggtggcagccctcgcgaaagaagttatggaaggcgtgtggcccttagcggtgcctcttgaagtcgaagttggtattggcgaggattggctggctgccaaagga

SEQ ID NO: 6144 - protein, 841 aa, synthetic construct
  REGION 1..841: note = Variant of DNA polymerase I from Thermus sp. strain 2.9
MHHHHHHGGSGVLPVFEPKGRVLLVDGHHLAYRNFFALKGLTTSLGEPVQGVYGFAKSLLKALKEDGDVVIVVFDAKAPSFRHEAYEAYKAGRAPTPEDFPRQLALMKELVDLLGLERLEVPGFEADDVLATLAKKAEREGYEVQILTADRDLFQLLSPRISVLHPEGHRITPEWLWEKYGLRPEQWVDFRALAGDPSDNIPGVKGIGEKTALKLLKEWGSLENLLKNLDQVKPESVREKILAHLEDLKLSRELSRVRTDLPLEVDFGRRREPDWEGLKAFLERLEFGSLLHEFGLLESPLLAEEAPWPPPEGAFLGYRLSRPEPMWAELLALAASAQGRVYRAEDPHGALRGLFEVRGLLAKDLAVVALREGLDLPPTDDPMLLVYLLDPSNTTPEGVARRYGGEWTEDAAKRALLAERLHENLLGRLQGEERLLWLYEEVEKPLSRVLAHMEATGVKLDVAYLENLSLEVAAHMRRLEEEVFRLAGRSFRLNSRDQLERVLFDELGLPPIGKTEKTGKRSTSAAVLEALREVHPIVDKILQYREMAKLKGTYIDRLPALVHPKTGRLHTRFNQTATATGRLSSSDPNLQNIPVRTPLGQKIRRAFVAEEGWRLVALDYRQIELRVLAHLSGDENLIRVFQEGKDIHTQTASWMFGLSAEAIDPLMRRAAKTINFGVLYGMSAFRLSQELGIPYEEAQAFIQKYFQSYPKVKAWIEKTLREGRTRGYVETLFGRRRYVPDLNARVKGKREAAERMAFNMPVQGTAADLMKLAMVRLFPQLREVGARMLLQVHDELLLEAPKERAEEVAALAKEVMEGVWPLAVPLEVEVGIGEDWLAAKG

SEQ ID NO: 6145 - DNA, 2523 bp, synthetic construct
  misc_feature 1..2523: note = Variant of DNA polymerase I from Thermus sp. strain 2.9
  source 1..2523: mol_type = other DNA
atgcaccatcatcatcatcatggcggtagcggcgtgttaccggtgttcgagcctaaaggtcgcgtgcttctggttgatggccatcatctcgcgtatcgtaacttctttgccctgaaaggattaaccaccagcctgggcgagccggtacagggtgtctacggctttgcaaagtcgctcctgaaagctctgaaagaagacggtgatgtggtgattgttgtctttgatgcgaaagcgccaagttttcgccacgaagcgtacgaagcttacaaagccgggcgtgctccaacgccggaagactttcctcgccaattggcgcttatgaaggaattagtggatttgcttggcctcgaacgcttggaagttcccggtttcgaggcagacgacgtattagcgactctcgcaaagaaagccgaacgtgagggctatgaagtccagatcttgacagcagatcgcgatcttttccagcttttatctccgcgcatctcggtgttacacccggaagggcatcgtatcaccccggaatggctctgggagaaatatggtttgcgtcccgaacaatgggtggattttcgcgccttagcaggcgatccgagcgacaatattccgggagttaaaggtatcggcgagaagacggcgctcaagctccttaaagaatgggggtcgttggagaacttgcttaagaatttagatcaggtcaaaccagagtcagtgcgtgagaagattcttgctcacctcgaagacctcaaattaagccgcgaattgtcccgtgtacgcaccgatttgccgctcgaagttgatttcggtcgccgccgcgaacctgactgggagggtcttaaagcgtttttagagcgtcttgaatttggttcgctcttgcatgaattcggccttttagaaagcccgttactggccgaagaagcaccttggccaccgcccgagggcgcgtttttaggttaccgtttgagtcgcccggaaccgatgtgggccgaattactggctcttgcagcgtctgcccagggacgtgtgtatcgcgcggaagaccctcatggtgcgctccgcggcctcttcgaagtccgtggactccttgccaaagacttagctgttgttgcattgcgcgaaggtcttgatttacctccgactgatgatccaatgcttcttgcgtacctcttggacccgtcaaacacgacgcccgaaggcgtagcccgtcgttacggcggcgagtggaccgaagatgcagcgaaacgcgcgttattggccgaacgtttgcacgaaaatttattaggacgtttgcaaggcgaggaacgtctcctctggctttacgaagaagtggagaaaccattgagtcgcgtgctcgcgcatatggaagctaccggtgtcaaattagacgtggcgtatttggagaatctcagccttgaagttgctgcccacatgcgccgcttggaggaagaagtattccgtttagcaggccgttcctttcgccttaactctcgcgatcagttagaacgtgtgttgttcgatgaacttggtctccctcctatcggcaagacagagaagaccggtaaacgtagcacttcagcggcggttttagaagctcttcgcgaagtccatcccattgtggacaagatcttgcagtaccgcgaaatggcgaaattgaaaggcacctatattgaccgtcttccggcattagtccacccgaaaacgggacgcctccatacccgcttcaaccaaacagccacggcgaccggtcgtttgtcctcctctgatccaaaccttcagaatattccagtacgtaccccattgggccagaagatccgccgtgcgtttgtagctgaggagggttggcgtttagtggccctcgattatcgtcaaattgaattacgtgtccttgcccatctttctggcgatgagaacctcatccgcgtgtttcaggaaggcaaagacattcacactcaaacggcaagctggatgtttggattatcagctgaagcgatcgatcctttgatgcgtcgtgcagcgaagaccatcaatttcggtgttctctacggtatgagtgcctttcgtttgtcgcaggaattaggcattcccgaggaagaagctcaggcgttcattcagaaatactttcaaagctatcccaaagttaaagcatggatcgagaagactctccgtgaaggccgcacacgtggttacgtagagaccttatttggacgtcgccgctatgttcccgatttaaacgctcgcgtgaaaggcaagcgtgaagccgccgaacgcatggcgttcaacatgcctgtacagggcacggcagctgacctcatgaaacttgcaatggtgcgcctttttccacaattgcgtgaagttggtgcccgcatgctcttgcaggtccacgatgaactcttgttagaagcgccaaaagagcgtgcggaagaggtggcagccctcgcgaaagaagttatggaaggcgtgtggcccttagcggtgcctcttgaagtcgaagttggtattggcgaggattggctggctgccaaagga

SEQ ID NO: 6146 - protein, 841 aa, synthetic construct
  REGION 1..841: note = Variant of DNA polymerase I from Thermus sp. strain 2.9
MHHHHHHGGSGVLPVFEPKGRVLLVDGHHLAYRNFFALKGLTTSLGEPVQGVYGFAKSLLKALKEDGDVVIVVFDAKAPSFRHEAYEAYKAGRAPTPEDFPRQLALMKELVDLLGLERLEVPGFEADDVLATLAKKAEREGYEVQILTADRDLFQLLSPRISVLHPEGHRITPEWLWEKYGLRPEQWVDFRALAGDPSDNIPGVKGIGEKTALKLLKEWGSLENLLKNLDQVKPESVREKILAHLEDLKLSRELSRVRTDLPLEVDFGRRREPDWEGLKAFLERLEFGSLLHEFGLLESPLLAEEAPWPPPEGAFLGYRLSRPEPMWAELLALAASAQGRVYRAEDPHGALRGLFEVRGLLAKDLAVVALREGLDLPPTDDPMLLAYLLDPSNTTPEGVARRYGGEWTEDAAKRALLAERLHENLLGRLQGEERLLWLYEEVEKPLSRVLAHMEATGVKLDVAYLENLSLEVAAHMRRLEEEVFRLAGRSFRLNSRDQLERVLFDELGLPPIGKTEKTGKRSTSAAVLEALREVHPIVDKILQYREMAKLKGTYIDRLPALVHPKTGRLHTRFNQTATATGRLSSSDPNLQNIPVRTPLGQKIRRAFVAEEGWRLVALDYRQIELRVLAHLSGDENLIRVFQEGKDIHTQTASWMFGLSAEAIDPLMRRAAKTINFGVLYGMSAFRLSQELGIPEEEAQAFIQKYFQSYPKVKAWIEKTLREGRTRGYVETLFGRRRYVPDLNARVKGKREAAERMAFNMPVQGTAADLMKLAMVRLFPQLREVGARMLLQVHDELLLEAPKERAEEVAALAKEVMEGVWPLAVPLEVEVGIGEDWLAAKG

SEQ ID NO: 6147 - DNA, 2523 bp, synthetic construct
  misc_feature 1..2523: note = Variant of DNA polymerase I from Thermus sp. strain 2.9
  source 1..2523: mol_type = other DNA
atgcaccatcatcatcatcatggcggtagcggcgtgttaccggtgttcgagcctaaaggtcgcgtgcttctggttgatggccatcatctcgcgtatcgtaacttctttgccctgaaaggattaaccaccagcctgggcgagccggtacagggtgtctacggctttgcaaagtcgctcctgaaagctctgaaagaagacggtgatgtggtgattgttgtctttgatgcgaaagcgccaagttttcgccacgaagcgtacgaagcttacaaagccgggcgtgctccaacgccggaagactttcctcgccaattggcgcttatgaaggaattagtggatttgcttggcctcgaacgcttggaagttcccggtttcgaggcagacgacgtattagcgactctcgcaaagaaagccgaacgtgagggctatgaagtccagatcttgacagcagatcgcgatcttttccagcttttatctccgcgcatctcggtgttacacccggaagggcatcgtatcaccccggaatggctctgggagaaatatggtttgcgtcccgaacaatgggtggattttcgcgccttagcaggcgatccgagcgacaatattccgggagttaaaggtatcggcgagaagacggcgctcaagctccttaaagaatgggggtcgttggagaacttgcttaagaatttagatcaggtcaaaccagagtcagtgcgtgagaagattcttgctcacctcgaagacctcaaattaagccgcgaattgtcccgtgtacgcaccgatttgccgctcgaagttgatttcggtcgccgccgcgaacctgactgggagggtcttaaagcgtttttagagcgtcttgaatttggttcgctcttgcatgaattcggccttttagaaagcccgttactggccgaagaagcaccttggccaccgcccgagggcgcgtttttaggttaccgtttgagtcgcccggaaccgatgtgggccgaattactggctcttgcagcgtctgcccagggacgtgtgtatcgcgcggaagaccctcatggtgcgctccgcggcctcttcgaagtccgtggactccttgccaaagacttagctgttgttgcattgcgcgaaggtcttgatttacctccgactgatgatccaatgcttcttgcgtacctcttggacccgtcaaacacgacgcccgaaggcgtagcccgtcgttacggcggcgagtggaccgaagatgcagcgaaacgcgcgttattggccgaacgtttgcacgaaaatttattaggacgtttgcaaggcgaggaacgtctcctctggctttacgaagaagtggagaaaccattgagtcgcgtgctcgcgcatatggaagctaccggtgtcaaattagacgtggcgtatttggagaatctcagccttgaagttgctgcccacatgcgccgcttggaggaagaagtattccgtttagcaggccgttcctttcgccttaactctcgcgatcagttagaacgtgtgttgttcgatgaacttggtctccctcctatcggcaagacagagaagaccggtaaacgtagcacttcagcggcggttttagaagctcttcgcgaagtccatcccattgtggacaagatcttgcagtaccgcgaaatggcgaaattgaaaggcacctatattgaccgtcttccggcattagtccacccgaaaacgggacgcctccatacccgcttcaaccaaacagccacggcgaccggtcgtttgtcctcctctgatccaaaccttcagaatattccagtacgtaccccattgggccagaagatccgccgtgcgtttgtagctgaggagggttggcgtttagtggccctcgattatcgtcaaattgaattacgtgtccttgcccatctttctggcgatgagaacctcatccgcgtgtttcaggaaggcaaagacattcacactcaaacggcaagctggatgtttggattatcagctgaagcgatcgatcctttgatgcgtcgtgcagcgaagaccatcaatttcggtgttctctacggtatgagtgcctttcgtttgtcgcaggaattaggcattccctatgaagaagctcaggcgttcattcagaaatactttcaaagctatcccaaagttaaagcatggatcgagaagactctccgtgaaggccgcacacgtggttacgtagagaccttatttggacgtcgccgctatgttcccgatttaaacgctcgcgtgaaaggcaagcgtgaagccgccgaacgcatggcgttcaacatgcctgtacagggcacggcagctgacctcatgaaacttgcaatggtgcgcctttttccacaattgcgtgaagttggtgcccgcatgctcttgcaggtccacgatgaactcttgttagaagcgccaaaagagcgtgcggaagaggtggcagccctcgcgaaagaagttatggaaggcgtgtggcccttagcggtgcctcttgaagtcgaagttggtattggcgaggattggctggctactaaagga

SEQ ID NO: 6148 - protein, 841 aa, synthetic construct
  REGION 1..841: note = Variant of DNA polymerase I from Thermus sp. strain 2.9
MHHHHHHGGSGVLPVFEPKGRVLLVDGHHLAYRNFFALKGLTTSLGEPVQGVYGFAKSLLKALKEDGDVVIVVFDAKAPSFRHEAYEAYKAGRAPTPEDFPRQLALMKELVDLLGLERLEVPGFEADDVLATLAKKAEREGYEVQILTADRDLFQLLSPRISVLHPEGHRITPEWLWEKYGLRPEQWVDFRALAGDPSDNIPGVKGIGEKTALKLLKEWGSLENLLKNLDQVKPESVREKILAHLEDLKLSRELSRVRTDLPLEVDFGRRREPDWEGLKAFLERLEFGSLLHEFGLLESPLLAEEAPWPPPEGAFLGYRLSRPEPMWAELLALAASAQGRVYRAEDPHGALRGLFEVRGLLAKDLAVVALREGLDLPPTDDPMLLAYLLDPSNTTPEGVARRYGGEWTEDAAKRALLAERLHENLLGRLQGEERLLWLYEEVEKPLSRVLAHMEATGVKLDVAYLENLSLEVAAHMRRLEEEVFRLAGRSFRLNSRDQLERVLFDELGLPPIGKTEKTGKRSTSAAVLEALREVHPIVDKILQYREMAKLKGTYIDRLPALVHPKTGRLHTRFNQTATATGRLSSSDPNLQNIPVRTPLGQKIRRAFVAEEGWRLVALDYRQIELRVLAHLSGDENLIRVFQEGKDIHTQTASWMFGLSAEAIDPLMRRAAKTINFGVLYGMSAFRLSQELGIPYEEAQAFIQKYFQSYPKVKAWIEKTLREGRTRGYVETLFGRRRYVPDLNARVKGKREAAERMAFNMPVQGTAADLMKLAMVRLFPQLREVGARMLLQVHDELLLEAPKERAEEVAALAKEVMEGVWPLAVPLEVEVGIGEDWLATKG

SEQ ID NO: 6149 - DNA, 2523 bp, synthetic construct
  misc_feature 1..2523: note = Variant of DNA polymerase I from Thermus sp. strain 2.9
  source 1..2523: mol_type = other DNA
atgcaccatcatcatcatcatggcggtagcggcgtgttaccggtgttcgagcctaaaggtcgcgtgcttctggttgatggccatcatctcgcgtatcgtaacttctttgccctgaaaggattaaccaccagcctgggcgagccggtacagggtgtctacggctttgcaaagtcgctcctgaaagctctgaaagaagacggtgatgtggtgattgttgtctttgatgcgaaagcgccaagttttcgccacgaagcgtacgaagcttacaaagccgggcgtgctccaacgccggaagactttcctcgccaattggcgcttatgaaggaattagtggatttgcttggcctcgaacgcttggaagttcccggtttcgaggcagacgacgtattagcgactctcgcaaagaaagccgaacgtgagggctatgaagtccagatcttgacagcagatcgcgatcttttccagcttttatctccgcgcatctcggtgttacacccggaagggcatcgtatcaccccggaatggctctgggagaaatatggtttgcgtcccgaacaatgggtggattttcgcgccttagcaggcgatccgagcgacaatattccgggagttaaaggtatcggcgagaagacggcgctcaagctccttaaagaatgggggtcgttggagaacttgcttaagaatttagatcaggtcaaaccagagtcagtgcgtgagaagattcttgctcacctcgaagacctcaaattaagccgcgaattgtcccgtgtacgcaccgatttgccgctcgaagttgatttcggtcgccgccgcgaacctgactgggagggtcttaaagcgtttttagagcgtcttgaatttggttcgctcttgcatgaattcggccttttagaaagcccgttactggccgaagaagcaccttggccaccgcccgagggcgcgtttttaggttaccgtttgagtcgcccggaaccgatgtgggccgaattactggctcttgcagcgtctgcccaggctcgtgtgtatcgcgcggaagaccctcatggtgcgctccgcggcctcttcgaagtccgtggactccttgccaaagacttagctgttgttgcattgcgcgaaggtcttgatttacctccgactgatgatccaatgcttcttgcgtacctcttggacccgtcaaacacgacgcccgaaggcgtagcccgtcgttacggcggcgagtggaccgaagatgcagcgaaacgcgcgttattggccgaacgtttgcacgaaaatttattaggacgtttgcaaggcgaggaacgtctcctctggctttacgaagaagtggagaaaccattgagtcgcgtgctcgcgcatatggaagctaccggtgtcaaattagacgtggcgtatttggagaatctcagccttgaagttgctgcccacatgcgccgcttggaggaagaagtattccgtttagcaggccgttcctttcgccttaactctcgcgatcagttagaacgtgtgttgttcgatgaacttggtctccctcctatcggcaagacagagaagaccggtaaacgtagcacttcagcggcggttttagaagctcttcgcgaagtccatcccattgtggacaagatcttgcagtaccgcgaaatggcgaaattgaaaggcacctatattgaccgtcttccggcattagtccacccgaaaacgggacgcctccatacccgcttcaaccaaacagccacggcgaccggtcgtttgtcctcctctgatccaaaccttcagaatattccagtacgtaccccattgggccagaagatccgccgtgcgtttgtagctgaggagggttggcgtttagtggccctcgattatcgtcaaattgaattacgtgtccttgcccatctttctggcgatgagaacctcatccgcgtgtttcaggaaggcaaagacattcacactcaaacggcaagctggatgtttggattatcagctgaagcgatcgatcctttgatgcgtcgtgcagcgaagaccatcaatttcggtgttctctacggtatgagtgcctttcgtttgtcgcaggaattaggcattccctatgaagaagctcaggcgttcattcagaaatactttcaaagctatcccaaagttaaagcatggatcgagaagactctccgtgaaggccgcacacgtggttacgtagagaccttatttggacgtcgccgctatgttcccgatttaaacgctcgcgtgaaaggcaagcgtgaagccgccgaacgcatggcgttcaacatgcctgtacagggcacggcagctgacctcatgaaacttgcaatggtgcgcctttttccacaattgcgtgaagttggtgcccgcatgctcttgcaggtccacgatgaactcttgttagaagcgccaaaagagcgtgcggaagaggtggcagccctcgcgaaagaagttatggaaggcgtgtggcccttagcggtgcctcttgaagtcgaagttggtattggcgaggattggctggctgccaaagga

SEQ ID NO: 6150 - protein, 841 aa, synthetic construct
  REGION 1..841: note = Variant of DNA polymerase I from Thermus sp. strain 2.9
MHHHHHHGGSGVLPVFEPKGRVLLVDGHHLAYRNFFALKGLTTSLGEPVQGVYGFAKSLLKALKEDGDVVIVVFDAKAPSFRHEAYEAYKAGRAPTPEDFPRQLALMKELVDLLGLERLEVPGFEADDVLATLAKKAEREGYEVQILTADRDLFQLLSPRISVLHPEGHRITPEWLWEKYGLRPEQWVDFRALAGDPSDNIPGVKGIGEKTALKLLKEWGSLENLLKNLDQVKPESVREKILAHLEDLKLSRELSRVRTDLPLEVDFGRRREPDWEGLKAFLERLEFGSLLHEFGLLESPLLAEEAPWPPPEGAFLGYRLSRPEPMWAELLALAASAQARVYRAEDPHGALRGLFEVRGLLAKDLAVVALREGLDLPPTDDPMLLAYLLDPSNTTPEGVARRYGGEWTEDAAKRALLAERLHENLLGRLQGEERLLWLYEEVEKPLSRVLAHMEATGVKLDVAYLENLSLEVAAHMRRLEEEVFRLAGRSFRLNSRDQLERVLFDELGLPPIGKTEKTGKRSTSAAVLEALREVHPIVDKILQYREMAKLKGTYIDRLPALVHPKTGRLHTRFNQTATATGRLSSSDPNLQNIPVRTPLGQKIRRAFVAEEGWRLVALDYRQIELRVLAHLSGDENLIRVFQEGKDIHTQTASWMFGLSAEAIDPLMRRAAKTINFGVLYGMSAFRLSQELGIPYEEAQAFIQKYFQSYPKVKAWIEKTLREGRTRGYVETLFGRRRYVPDLNARVKGKREAAERMAFNMPVQGTAADLMKLAMVRLFPQLREVGARMLLQVHDELLLEAPKERAEEVAALAKEVMEGVWPLAVPLEVEVGIGEDWLAAKG

SEQ ID NO: 6151 - DNA, 2523 bp, synthetic construct
  misc_feature 1..2523: note = Variant of DNA polymerase I from Thermus sp. strain 2.9
  source 1..2523: mol_type = other DNA
atgcaccatcatcatcatcatggcggtagcggcgtgttaccggtgttcgagcctaaaggtcgcgtgcttctggttgatggccatcatctcgcgtatcgtaacttctttgccctgaaaggattaaccaccagcctgggcgagccggtacagggtgtctacggctttgcaaagtcgctcctgaaagctctgaaagaagacggtgatgtggtgattgttgtctttgatgcgaaagcgccaagttttcgccacgaagcgtacgaagcttacaaagccgggcgtgctccaacgccggaagactttcctcgccaattggcgcttatgaaggaattagtggatttgcttggcctcgaacgcttggaagttcccggtttcgaggcagacgacgtattagcgactctcgcaaagaaagccgaacgtgagggctatgaagtccagatcttgacagcagatcgcgatcttttccagcttttatctccgcgcatctcggtgttacacccggaagggcatcgtatcaccccggaatggctctgggagaaatatggtttgcgtcccgaacaatgggtggattttcgcgccttagcaggcgatccgagcgacaatattccgggagttaaaggtatcggcgagaagacggcgctcaagctccttaaagaatgggggtcgttggagaacttgcttaagaatttagatcaggtcaaaccagagtcagtgcgtgagaagattcttgctcacctcgaagacctcaaattaagccgcgaattgtcccgtgtacgcaccgatttgccgctcgaagttgatttcggtcgccgccgcgaacctgactgggagggtcttaaagcgtttttagagcgtcttgaatttggttcgctcttgcatgaattcggccttttagaaagcccgttactggccgaagaagcaccttggccaccgcccgagggcgcgtttttaggttaccgtttgagtcgcccggaaccgatgtgggccgaattactggctcttgcagcgtctgcccagggacgtgtgtatcgcgcggaagaccctcatggtgcgctccgcggcctcttcgaagtccgtggcctccttgccaaagacttagctgttgttgcattgcgcgaaggtcttgatttacctccgactgatgatccaatgcttcttgcgtacctcttggacccgtcaaacacgacgcccgaaggcgtagcccgtcgttacggcggcgagtggtgggaagatgcagccaaacgcgcgttattggccgaacgtttgcacgaaaatttattaggacgtttgcaaggcgaggaacgtctcctctggctttacgaagaagtggagaaaccattgagtcgcgtgctcgcgcatatggaagctaccggtgtcaaattagacgtggcgtatttggagaatctcagccttgaagttgctgcccacatgcgccgcttggaggaagaagtattccgtttagcaggccgttcctttcgccttaactctcgcgatcagttagaacgtgtgttgttcgatgaacttggtctccctcctatcggcaagacagagaagaccggtaaacgtagcacttcagcggcggttttagaagctcttcgcgaagtccatcccattgtggacaagatcttgcagtaccgcgaaatggcgaaattgaaaggcacctatattgaccgtcttccggcattagtccacccgaaaacgggacgcctccatacccgcttcaaccaaacagccacggcgaccggtcgtttgtcctcctctgatccaaaccttcagaatattccagtacgtacctttttgggccagaagatccgccgtgcgtttgtagctgagccgggttggcgtttagtggccctcgattatcgtcaaattgaattacgtgtccttgcccatctttctggcgatgagaacctcatccgcgtgtttcaggaaggcaaagacattcacactcaaacggcaagctggatgtttggattatcagctgaagcgatcgatcctttgatgcgtcgtgcagcgaagaccatcaatttcggtgttctctacggtatgagtgcctttcgtttgtcgcaggaattaggcattccctatgaagaagctcaggcgttcattcagaaatactttcaaagctatcccaaagttaaagcatggatcgagaagactctccgtgaaggccgcacacgtggttacgtagagaccttatttggacgtcgccgctatgttcccgatttaaacgctcgcgtgaaaggcaagcgtgaagccgccgaacgcatggcgttcaacatgcctgtacagggcacggcagctgacctcatgaaacttgcaatggtgcgcctttttccacaattgcgtgaagttggtgcccgcatgctgttgcaggtccacgatgaactcttgttagaagcgccaaaagagcgtgcggaagaggtggcagccctcgcgaaagaagttatggaaggcgtgtggcccttagcggtgcctcttgaagtcgaagttggtattggcgaggattggctggctgccaaagga

SEQ ID NO: 6152 - protein, 841 aa, synthetic construct
  REGION 1..841: note = Variant of DNA polymerase I from Thermus sp. strain 2.9
MHHHHHHGGSGVLPVFEPKGRVLLVDGHHLAYRNFFALKGLTTSLGEPVQGVYGFAKSLLKALKEDGDVVIVVFDAKAPSFRHEAYEAYKAGRAPTPEDFPRQLALMKELVDLLGLERLEVPGFEADDVLATLAKKAEREGYEVQILTADRDLFQLLSPRISVLHPEGHRITPEWLWEKYGLRPEQWVDFRALAGDPSDNIPGVKGIGEKTALKLLKEWGSLENLLKNLDQVKPESVREKILAHLEDLKLSRELSRVRTDLPLEVDFGRRREPDWEGLKAFLERLEFGSLLHEFGLLESPLLAEEAPWPPPEGAFLGYRLSRPEPMWAELLALAASAQGRVYRAEDPHGALRGLFEVRGLLAKDLAVVALREGLDLPPTDDPMLLAYLLDPSNTTPEGVARRYGGEWWEDAAKRALLAERLHENLLGRLQGEERLLWLYEEVEKPLSRVLAHMEATGVKLDVAYLENLSLEVAAHMRRLEEEVFRLAGRSFRLNSRDQLERVLFDELGLPPIGKTEKTGKRSTSAAVLEALREVHPIVDKILQYREMAKLKGTYIDRLPALVHPKTGRLHTRFNQTATATGRLSSSDPNLQNIPVRTFLGQKIRRAFVAEPGWRLVALDYRQIELRVLAHLSGDENLIRVFQEGKDIHTQTASWMFGLSAEAIDPLMRRAAKTINFGVLYGMSAFRLSQELGIPYEEAQAFIQKYFQSYPKVKAWIEKTLREGRTRGYVETLFGRRRYVPDLNARVKGKREAAERMAFNMPVQGTAADLMKLAMVRLFPQLREVGARMLLQVHDELLLEAPKERAEEVAALAKEVMEGVWPLAVPLEVEVGIGEDWLAAKG

SEQ ID NO: 6153 - DNA, 2523 bp, synthetic construct
  misc_feature 1..2523: note = Variant of DNA polymerase I from Thermus sp. strain 2.9
  source 1..2523: mol_type = other DNA
atgcaccatcatcatcatcatggcggtagcggcgtgttaccggtgttcgagcctaaaggtcgcgtgcttctggttgatggccatcatctcgcgtatcgtaacttctttgccctgaaaggattaaccaccagcctgggcgagccggtacagggtgtctacggctttgcaaagtcgctcctgaaagctctgaaagaagacggtgatgtggtgattgttgtctttgatgcgaaagcgccaagttttcgccacgaagcgtacgaagcttacaaagccgggcgtgctccaacgccggaagactttcctcgccaattggcgcttatgaaggaattagtggatttgcttggcctcgaacgcttggaagttcccggtttcgaggcagacgacgtattagcgactctcgcaaagaaagccgaacgtgagggctatgaagtccagatcttgacagcagatcgcgatcttttccagcttttatctccgcgcatctcggtgttacacccggaagggcatcgtatcaccccggaatggctctgggagaaatatggtttgcgtcccgaacaatgggtggattttcgcgccttagcaggcgatccgagcgacaatattccgggagttaaaggtatcggcgagaagacggcgctcaagctccttaaagaatgggggtcgttggagaacttgcttaagaatttagatcaggtcaaaccagagtcagtgcgtgagaagattcttgctcacctcgaagacctcaaattaagccgcgaattgtcccgtgtacgcaccgatttgccgctcgaagttgatttcggtcgccgccgcgaacctgactgggagggtcttaaagcgtttttagagcgtcttgaatttggttcgctcttgcatgaattcggccttttagaaagcccgttactggccgaagaagcaccttggccaccgcccgagggcgcgtttttaggttaccgtttgagtcgcccggaaccgatgtgggccgaattactggctcttgcagcgtctgcccagggacgtgtgtatcgcgcggaagaccctcatggtgcgctccgcggcctcttcgaagtccgtggactccttgccaaagacttagctgttgttgcattgcgcgaaggtcttgatttacctccgactgatgatccaatgcttcttgcgtacctcttggacccgtcaaacacgacgcccgaaggcgtagcccgtcgttacggcggcgagtggtgggaagatgcaggcaaacgcgcgttattggccgaacgtttgcacgaaaatttattaggacgtttgcaaggcgaggaacgtctcctctggctttacgaagaagtggagaaaccattgagtcgcgtgctcgcgcatatggaagctaccggtgtcaaattagacgtggcgtatttggagaatctcagccttgaagttgctgcccacatgcgccgcttggaggaagaagtattccgtttagcaggccgttcctttcgccttaactctcgcgatcagttagaacgtgtgttgttcgatgaacttggtctccctcctatcggcaagacagagaagaccggtaaacgtagcacttcagcggcggttttagaagctcttcgcgaagtccatcccattgtggacaagatcttgcagtaccgcgaaatggcgaaattgaaaggcacctatattgaccgtcttccggcattagtccacccgaaaacgggacgcctccatacccgcttcaaccaaacagccacggcgaccggtcgtttgtcctcctctgatccaaaccttcagaatattccagtacgtaccccattgggccagaagatccgccgtgcgtttgtagctgaggagggttggcgtttagtggccctcgattatcgtcaaattgaattacgtgtccttgcccatctttctggcgatgagaacctcatccgcgtgtttcaggaaggcaaagacattcacactcaaacggcaagctggatgtttggattatcagctgaagcgatcgatcctttgatgcgtcgtgcagcgaagaccatcaatttcggtgttctctacggtatgagtgcctttcgtttgtcgcaggaattaggcattccctatgaagaagctcaggcgttcattcagaaatactttcaaagctatcccaaagttaaagcatggatcgagaagactctccgtgaaggccgcacacgtggttacgtagagaccttatttggacgtcgccgctatgttcccgatttaaacgctcgcgtgaaaggcaagcgtgaagccgccgaacgcatggcgttcaacatgcctgtacagggcacggcagctgacctcatgaaacttgcaatggtgcgcctttttccacaattgcgtgaagttggtgcccgcatgctgttgcaggtccacgatgaactcttgttagaagcgccaaaagagcgtgcggaagaggtggcagccctcgcgaaagaagttatggaaggcgtgtggcccttagcggtgcctcttgaagtcgaagttggtattggcgaggattggctggctgccaaagga

SEQ ID NO: 6154 - protein, 841 aa, synthetic construct
  REGION 1..841: note = Variant of DNA polymerase I from Thermus sp. strain 2.9
MHHHHHHGGSGVLPVFEPKGRVLLVDGHHLAYRNFFALKGLTTSLGEPVQGVYGFAKSLLKALKEDGDVVIVVFDAKAPSFRHEAYEAYKAGRAPTPEDFPRQLALMKELVDLLGLERLEVPGFEADDVLATLAKKAEREGYEVQILTADRDLFQLLSPRISVLHPEGHRITPEWLWEKYGLRPEQWVDFRALAGDPSDNIPGVKGIGEKTALKLLKEWGSLENLLKNLDQVKPESVREKILAHLEDLKLSRELSRVRTDLPLEVDFGRRREPDWEGLKAFLERLEFGSLLHEFGLLESPLLAEEAPWPPPEGAFLGYRLSRPEPMWAELLALAASAQGRVYRAEDPHGALRGLFEVRGLLAKDLAVVALREGLDLPPTDDPMLLAYLLDPSNTTPEGVARRYGGEWWEDAGKRALLAERLHENLLGRLQGEERLLWLYEEVEKPLSRVLAHMEATGVKLDVAYLENLSLEVAAHMRRLEEEVFRLAGRSFRLNSRDQLERVLFDELGLPPIGKTEKTGKRSTSAAVLEALREVHPIVDKILQYREMAKLKGTYIDRLPALVHPKTGRLHTRFNQTATATGRLSSSDPNLQNIPVRTPLGQKIRRAFVAEEGWRLVALDYRQIELRVLAHLSGDENLIRVFQEGKDIHTQTASWMFGLSAEAIDPLMRRAAKTINFGVLYGMSAFRLSQELGIPYEEAQAFIQKYFQSYPKVKAWIEKTLREGRTRGYVETLFGRRRYVPDLNARVKGKREAAERMAFNMPVQGTAADLMKLAMVRLFPQLREVGARMLLQVHDELLLEAPKERAEEVAALAKEVMEGVWPLAVPLEVEVGIGEDWLAAKG

SEQ ID NO: 6155 - DNA, 2523 bp, synthetic construct
  misc_feature 1..2523: note = Variant of DNA polymerase I from Thermus sp. strain 2.9
  source 1..2523: mol_type = other DNA
atgcaccatcatcatcatcatggcggtagcggcgtgttaccggtgttcgagcctaaaggtcgcgtgcttctggttgatggccatcatctcgcgtatcgtaacttctttgccctgaaaggattaaccaccagcctgggcgagccggtacagggtgtctacggctttgcaaagtcgctcctgaaagctctgaaagaagacggtgatgtggtgattgttgtctttgatgcgaaagcgccaagttttcgccacgaagcgtacgaagcttacaaagccgggcgtgctccaacgccggaagactttcctcgccaattggcgcttatgaaggaattagtggatttgcttggcctcgaacgcttggaagttcccggtttcgaggcagacgacgtattagcgactctcgcaaagaaagccgaacgtgagggctatgaagtccagatcttgacagcagatcgcgatcttttccagcttttatctccgcgcatctcggtgttacacccggaagggcatcgtatcaccccggaatggctctgggagaaatatggtttgcgtcccgaacaatgggtggattttcgcgccttagcaggcgatccgagcgacaatattccgggagttaaaggtatcggcgagaagacggcgctcaagctccttaaagaatgggggtcgttggagaacttgcttaagaatttagatcaggtcaaaccagagtcagtgcgtgagaagattcttgctcacctcgaagacctcaaattaagccgcgaattgtcccgtgtacgcaccgatttgccgctcgaagttgatttcggtcgccgccgcgaacctgactgggagggtcttaaagcgtttttagagcgtcttgaatttggttcgctcttgcatgaattcggccttttagaaagcccgttactggccgaagaagcaccttggccaccgcccgagggcgcgtttttaggttaccgtttgagtcgcccggaaccgatgtgggccgaattactgcagcttgcagcgtctgcccagggacgtgtgtatcgcgcggaagaccctcatggtgcgctccgcggcctcttcgaagtccgtggactccttgccaaagacttagctgttgttgcattgcgcgaaggtcttgatttacctccgactgatgatccaatgcttcttgcgtacctcttggacccgtcaaacacgacgcccgaaggcgtagcccgtcgttacggcggcgagtggaccgaagatgcagcgaaacgcgcgttattggccgaacgtttgcacgaaaatttattaggacgtttgcaaggcgaggaacgtctcctctggctttacgaagaagtggagaaaccattgagtcgcgtgctcgcgcatatggaagctaccggtgtcaaattagacgtggcgtatttggagaatctcagccttgaagttgctgcccacatgcgccgcttggaggaagaagtattccgtttagcaggccgttcctttcgccttaactctcgcgatcagttagaacgtgtgttgttcgatgaacttggtctccctcctatcggcaagacagagaagaccggtaaacgtagcacttcagcggcggttttagaagctcttcgcgaagtccatcccattgtggacaagatcttgcagtaccgcgaaatggcgaaattgaaaggcacctatattgaccgtcttccggcattagtccacccgaaaacgggacgcctccatacccgcttcaaccaaacagccacggcgaccggtcgtttgtcctcctctgatccaaaccttcagaatattccagtacgtaccccattgggccagaagatccgccgtgcgtttgtagctgaggagggttggcgtttagtggccctcgattatcgtcaaattgaattacgtgtccttgcccatctttctggcgatgagaacctcatccgcgtgtttcaggaaggcaaagacattcacactcaaacggcaagctggatgtttggattatcagctgaagcgatcgatcctttgatgcgtcgtgcagcgaagaccatcaatttcggtgttctctacggtatgagtgcctttcgtttgtcgcaggaattaggcattccctatgaagaagctcaggcgttcattcagaaatactttcaaagctatcccaaagttaaagcatggatcgagaagactctccgtgaaggccgcacacgtggttacgtagagaccttatttggacgtcgccgctatgttcccgatttaaacgctcgcgtgaaaggcaagcgtgaagccgccgaacgcatggcgttcaacatgcctgtacagggcacggcagctgacctcatgaaacttgcaatggtgcgcctttttccacaattgcgtgaagttggtgcccgcatgctcttgcaggtccacgatgaactcttgttagaagcgccaaaagagcgtgcggaagaggtggcagccctcgcgaaagaagttatggaaggcgtgtggcccttagcggtgcctcttgaagtcgaagttggtattggcgaggattggctggctgccaaagga

SEQ ID NO: 6156 - protein, 841 aa, synthetic construct
  REGION 1..841: note = Variant of DNA polymerase I from Thermus sp. strain 2.9
MHHHHHHGGSGVLPVFEPKGRVLLVDGHHLAYRNFFALKGLTTSLGEPVQGVYGFAKSLLKALKEDGDVVIVVFDAKAPSFRHEAYEAYKAGRAPTPEDFPRQLALMKELVDLLGLERLEVPGFEADDVLATLAKKAEREGYEVQILTADRDLFQLLSPRISVLHPEGHRITPEWLWEKYGLRPEQWVDFRALAGDPSDNIPGVKGIGEKTALKLLKEWGSLENLLKNLDQVKPESVREKILAHLEDLKLSRELSRVRTDLPLEVDFGRRREPDWEGLKAFLERLEFGSLLHEFGLLESPLLAEEAPWPPPEGAFLGYRLSRPEPMWAELLQLAASAQGRVYRAEDPHGALRGLFEVRGLLAKDLAVVALREGLDLPPTDDPMLLAYLLDPSNTTPEGVARRYGGEWTEDAAKRALLAERLHENLLGRLQGEERLLWLYEEVEKPLSRVLAHMEATGVKLDVAYLENLSLEVAAHMRRLEEEVFRLAGRSFRLNSRDQLERVLFDELGLPPIGKTEKTGKRSTSAAVLEALREVHPIVDKILQYREMAKLKGTYIDRLPALVHPKTGRLHTRFNQTATATGRLSSSDPNLQNIPVRTPLGQKIRRAFVAEEGWRLVALDYRQIELRVLAHLSGDENLIRVFQEGKDIHTQTASWMFGLSAEAIDPLMRRAAKTINFGVLYGMSAFRLSQELGIPYEEAQAFIQKYFQSYPKVKAWIEKTLREGRTRGYVETLFGRRRYVPDLNARVKGKREAAERMAFNMPVQGTAADLMKLAMVRLFPQLREVGARMLLQVHDELLLEAPKERAEEVAALAKEVMEGVWPLAVPLEVEVGIGEDWLAAKG

SEQ ID NO: 6157 - DNA, 2523 bp, synthetic construct
  misc_feature 1..2523: note = Variant of DNA polymerase I from Thermus sp. strain 2.9
  source 1..2523: mol_type = other DNA
atgcaccatcatcatcatcatggcggtagcggcgtgttaccggtgttcgagcctaaaggtcgcgtgcttctggttgatggccatcatctcgcgtatcgtaacttctttgccctgaaaggattaaccaccagcctgggcgagccggtacagggtgtctacggctttgcaaagtcgctcctgaaagctctgaaagaagacggtgatgtggtgattgttgtctttgatgcgaaagcgccaagttttcgccacgaagcgtacgaagcttacaaagccgggcgtgctccaacgccggaagactttcctcgccaattggcgcttatgaaggaattagtggatttgcttggcctcgaacgcttggaagttcccggtttcgaggcagacgacgtattagcgactctcgcaaagaaagccgaacgtgagggctatgaagtccagatcttgacagcagatcgcgatcttttccagcttttatctccgcgcatctcggtgttacacccggaagggcatcgtatcaccccggaatggctctgggagaaatatggtttgcgtcccgaacaatgggtggattttcgcgccttagcaggcgatccgagcgacaatattccgggagttaaaggtatcggcgagaagacggcgctcaagctccttaaagaatgggggtcgttggagaacttgcttaagaatttagatcaggtcaaaccagagtcagtgcgtgagaagattcttgctcacctcgaagacctcaaattaagccgcgaattgtcccgtgtacgcaccgatttgccgctcgaagttgatttcggtcgccgccgcgaacctgactgggagggtcttaaagcgtttttagagcgtcttgaatttggttcgctcttgcatgaattcggccttttagaaagcccgttactggccgaagaagcaccttggccaccgcccgagggcgcgtttttaggttaccgtttgagttgtccggaaccgatgtgggccgaattactggctcttgcagcgtctgcccagggacgtgtgtatcgcgcggaagaccctcatggtgcgctccgcggcctcttcgaagtccgtggactccttgccaaagacttagctgttgttgcattgcgcgaaggtcttgatttacctccgactgatgatccaatgcttcttgcgtacctcttggacccgtcaaacacgacgcccgaaggcgtagcccgtcgttacggcggcgagtggaccgaagatgcagcgaaacgcgcgttattggccgaacgtttgcacgaaaatttattaggacgtttgcaaggcgaggaacgtctcctctggctttacgaagaagtggagaaaccattgagtcgcgtgctcgcgcatatggaagctaccggtgtcaaattagacgtggcgtatttggagaatctcagccttgaagttgctgcccacatgcgccgcttggaggaagaagtattccgtttagcaggccgttcctttcgccttaactctcgcgatcagttagaacgtgtgttgttcgatgaacttggtctccctcctatcggcaagacagagaagaccggtaaacgtagcacttcagcggcggttttagaagctcttcgcgaagtccatcccattgtggacaagatcttgcagtaccgcgaaatggcgaaattgaaaggcacctatattgaccgtcttccggcattagtccacccgaaaacgggacgcctccatacccgcttcaaccaaacagccacggcgaccggtcgtttgtcctcctctgatccaaaccttcagaatattccagtacgtaccccattgggccagaagatccgccgtgcgtttgtagctgaggagggttggcgtttagtggccctcgattatcgtcaaattgaattacgtgtccttgcccatctttctggcgatgagaacctcatccgcgtgtttcaggaaggcaaagacattcacactcaaacggcaagctggatgtttggattatcagctgaagcgatcgatcctttgatgcgtcgtgcagcgaagaccatcaatttcggtgttctctacggtatgagtgcctttcgtttgtcgcaggaattaggcattccctatgaagaagctcaggcgttcattcagaaatactttcaaagctatcccaaagttaaagcatggatcgagaagactctccgtgaaggccgcacacgtggttacgtagagaccttatttggacgtcgccgctatgttcccgatttaaacgctcgcgtgaaaggcaagcgtgaagccgccgaacgcatggcgttcaacatgcctgtacagggcacggcagctgacctcatgaaacttgcaatggtgcgcctttttccacaattgcgtgaagttggtgcccgcatgctcttgcaggtccacgatgaactcttgttagaagcgccaaaagagcgtgcggaagaggtggcagccctcgcgaaagaagttatggaaggcgtgtggcccttagcggtgcctcttgaagtcgaagttggtattggcgaggattggctggctgccaaagga

SEQ ID NO: 6158 - protein, 841 aa, synthetic construct
  REGION 1..841: note = Variant of DNA polymerase I from Thermus sp. strain 2.9
MHHHHHHGGSGVLPVFEPKGRVLLVDGHHLAYRNFFALKGLTTSLGEPVQGVYGFAKSLLKALKEDGDVVIVVFDAKAPSFRHEAYEAYKAGRAPTPEDFPRQLALMKELVDLLGLERLEVPGFEADDVLATLAKKAEREGYEVQILTADRDLFQLLSPRISVLHPEGHRITPEWLWEKYGLRPEQWVDFRALAGDPSDNIPGVKGIGEKTALKLLKEWGSLENLLKNLDQVKPESVREKILAHLEDLKLSRELSRVRTDLPLEVDFGRRREPDWEGLKAFLERLEFGSLLHEFGLLESPLLAEEAPWPPPEGAFLGYRLSCPEPMWAELLALAASAQGRVYRAEDPHGALRGLFEVRGLLAKDLAVVALREGLDLPPTDDPMLLAYLLDPSNTTPEGVARRYGGEWTEDAAKRALLAERLHENLLGRLQGEERLLWLYEEVEKPLSRVLAHMEATGVKLDVAYLENLSLEVAAHMRRLEEEVFRLAGRSFRLNSRDQLERVLFDELGLPPIGKTEKTGKRSTSAAVLEALREVHPIVDKILQYREMAKLKGTYIDRLPALVHPKTGRLHTRFNQTATATGRLSSSDPNLQNIPVRTPLGQKIRRAFVAEEGWRLVALDYRQIELRVLAHLSGDENLIRVFQEGKDIHTQTASWMFGLSAEAIDPLMRRAAKTINFGVLYGMSAFRLSQELGIPYEEAQAFIQKYFQSYPKVKAWIEKTLREGRTRGYVETLFGRRRYVPDLNARVKGKREAAERMAFNMPVQGTAADLMKLAMVRLFPQLREVGARMLLQVHDELLLEAPKERAEEVAALAKEVMEGVWPLAVPLEVEVGIGEDWLAAKG

SEQ ID NO: 6159 - DNA, 2523 bp, synthetic construct
  misc_feature 1..2523: note = Variant of DNA polymerase I from Thermus sp. strain 2.9
  source 1..2523: mol_type = other DNA
atgcaccatcatcatcatcatggcggtagcggcgtgttaccggtgttcgagcctaaaggtcgcgtgcttctggttgatggccatcatctcgcgtatcgtaacttctttgccctgaaaggattaaccaccagcctgggcgagccggtacagggtgtctacggctttgcaaagtcgctcctgaaagctctgaaagaagacggtgatgtggtgattgttgtctttgatgcgaaagcgccaagttttcgccacgaagcgtacgaagcttacaaagccgggcgtgctccaacgccggaagactttcctcgccaattggcgcttatgaaggaattagtggatttgcttggcctcgaacgcttggaagttcccggtttcgaggcagacgacgtattagcgactctcgcaaagaaagccgaacgtgagggctatgaagtccagatcttgacagcagatcgcgatcttttccagcttttatctccgcgcatctcggtgttacacccggaagggcatcgtatcaccccggaatggctctgggagaaatatggtttgcgtcccgaacaatgggtggattttcgcgccttagcaggcgatccgagcgacaatattccgggagttaaaggtatcggcgagaagacggcgctcaagctccttaaagaatgggggtcgttggagaacttgcttaagaatttagatcaggtcaaaccagagtcagtgcgtgagaagattcttgctcacctcgaagacctcaaattaagccgcgaattgtcccgtgtacgcaccgatttgccgctcgaagttgatttcggtcgccgccgcgaacctgactgggagggtcttaaagcgtttttagagcgtcttgaatttggttcgctcttgcatgaattcggccttttagaaagcccgttactggccgaagaagcaccttggccaccgcccgagggcgcgtttttaggttaccgtttgagtcgcccggaaccgatgtgggccgaattactggctcttgcagcgtctgcccagggacgtgtgtatcgcgcggaagaccctcatggtgcgctccgcggcctcttcgaagtccgtggactccttgccaaagacttagctgttgttgcattgcgcgaaggtcttgatttacctccgactgatgatccaatgcttcttgcgtacctcttggacccgtcaaacacgacgcccgaaggcgtagcccgtcgttacggcggcgagtggaccgaagatgcagcgaaacgcgcgttattggccgaacgtttgcacgaaaatttattaggacgtttgcaaggcgaggaacgtctcctctggctttacgaagaagtggagaaaccattgagtcgcgtgctcgcgcatatggaagctaccggtgtcaaattagacgtggcgtatttggagaatctcagccttgaagttgctgcccacatgcgccgcttggaggaagaagtattccgtttagcaggccgttcctttcgccttaactctcgcgatcagttagaacgtgtgttgttcgatgaacttggtctccctcctatcggcaagacagagaagaccggtaaacgtagcacttcagcggcggttttagaagctcttcgcgaagtccatcccattgtggacaagatcttgcagtaccgcgaaatggcgaaattgaaaggcacctatattgaccgtcttccggcattagtccacccgaaaacgggacgcctccatacccgcttcaaccaaacagccacggcgaccggtcgtttgtcctcctctgatccaaaccttcagaatattccagtacgtaccgcgttgggccagaagatccgccgtgcgtttgtagctgaggagggttggcgtttagtggccctcgattatcgtcaaattgaattacgtgtccttgcccatctttctggcgatgagaacctcatccgcgtgtttcaggaaggcaaagacattcacactcaaacggcaagctggatgtttggattatcagctgaagcgatcgatcctttgatgcgtcgtgcagcgaagaccatcaatttcggtgttctctacggtatgagtgcctttcgtttgtcgcaggaattaggcattccctatgaagaagctcaggcgttcattcagaaatactttcaaagctatcccaaagttaaagcatggatcgagaagactctccgtgaaggccgcacacgtggttacgtagagaccttatttggacgtcgccgctatgttcccgatttaaacgctcgcgtgaaaggcaagcgtgaagccgccgaacgcatggcgttcaacatgcctgtacagggcacggcagctgacctcatgaaacttgcaatggtgcgcctttttccacaattgcgtgaagttggtgcccgcatgctcttgcaggtccacgatgaactcttgttagaagcgccaaaagagcgtgcggaagaggtggcagccctcgcgaaagaagttatggaaggcgtgtggcccttagcggtgcctcttgaagtcgaagttggtattggcgaggattggctggctgccaaagga

SEQ ID NO: 6160 - protein, 841 aa, synthetic construct
  REGION 1..841: note = Variant of DNA polymerase I from Thermus sp. strain 2.9
MHHHHHHGGSGVLPVFEPKGRVLLVDGHHLAYRNFFALKGLTTSLGEPVQGVYGFAKSLLKALKEDGDVVIVVFDAKAPSFRHEAYEAYKAGRAPTPEDFPRQLALMKELVDLLGLERLEVPGFEADDVLATLAKKAEREGYEVQILTADRDLFQLLSPRISVLHPEGHRITPEWLWEKYGLRPEQWVDFRALAGDPSDNIPGVKGIGEKTALKLLKEWGSLENLLKNLDQVKPESVREKILAHLEDLKLSRELSRVRTDLPLEVDFGRRREPDWEGLKAFLERLEFGSLLHEFGLLESPLLAEEAPWPPPEGAFLGYRLSRPEPMWAELLALAASAQGRVYRAEDPHGALRGLFEVRGLLAKDLAVVALREGLDLPPTDDPMLLAYLLDPSNTTPEGVARRYGGEWTEDAAKRALLAERLHENLLGRLQGEERLLWLYEEVEKPLSRVLAHMEATGVKLDVAYLENLSLEVAAHMRRLEEEVFRLAGRSFRLNSRDQLERVLFDELGLPPIGKTEKTGKRSTSAAVLEALREVHPIVDKILQYREMAKLKGTYIDRLPALVHPKTGRLHTRFNQTATATGRLSSSDPNLQNIPVRTALGQKIRRAFVAEEGWRLVALDYRQIELRVLAHLSGDENLIRVFQEGKDIHTQTASWMFGLSAEAIDPLMRRAAKTINFGVLYGMSAFRLSQELGIPYEEAQAFIQKYFQSYPKVKAWIEKTLREGRTRGYVETLFGRRRYVPDLNARVKGKREAAERMAFNMPVQGTAADLMKLAMVRLFPQLREVGARMLLQVHDELLLEAPKERAEEVAALAKEVMEGVWPLAVPLEVEVGIGEDWLAAKG

SEQ ID NO: 6161 - DNA, 2523 bp, synthetic construct
  misc_feature 1..2523: note = Variant of DNA polymerase I from Thermus sp. strain 2.9
  source 1..2523: mol_type = other DNA
atgcaccatcatcatcatcatggcggtagcggcgtgttaccggtgttcgagcctaaaggtcgcgtgcttctggttgatggccatcatctcgcgtatcgtaacttctttgccctgaaaggattaaccaccagcctgggcgagccggtacagggtgtctacggctttgcaaagtcgctcctgaaagctctgaaagaagacggtgatgtggtgattgttgtctttgatgcgaaagcgccaagttttcgccacgaagcgtacgaagcttacaaagccgggcgtgctccaacgccggaagactttcctcgccaattggcgcttatgaaggaattagtggatttgcttggcctcgaacgcttggaagttcccggtttcgaggcagacgacgtattagcgactctcgcaaagaaagccgaacgtgagggctatgaagtccagatcttgacagcagatcgcgatcttttccagcttttatctccgcgcatctcggtgttacacccggaagggcatcgtatcaccccggaatggctctgggagaaatatggtttgcgtcccgaacaatgggtggattttcgcgccttagcaggcgatccgagcgacaatattccgggagttaaaggtatcggcgagaagacggcgctcaagctccttaaagaatgggggtcgttggagaacttgcttaagaatttagatcaggtcaaaccagagtcagtgcgtgagaagattcttgctcacctcgaagacctcaaattaagccgcgaattgtcccgtgtacgcaccgatttgccgctcgaagttgatttcggtcgccgccgcgaacctgactgggagggtcttaaagcgtttttagagcgtcttgaatttggttcgctcttgcatgaattcggccttttagaaagcccgttactggccgaagaagcaccttggccaccgcccgagggcgcgtttttaggttaccgtttgagtcgcccggaaccgatgtgggccgaattactggctcttgcagcgtctgcccagggacgtgtgtatcgcgcggaagaccctcatggtgcgctccgcggcctcttcgaagtccgtggactccttgccaaagacttagctgttgttgcattgcgcgaaggtcttgatttacctccgactgatgatccaatgcttcttgcgtacctcttggacccgtcaaacacgacgcccgaaggcgtagcccgtcgttacggcggcgagtggaccgaagatgcagcgaaacgcgcgttattggccgaacgtttgcacgaaaatttattaggacgtttgcaaggcgaggaacgtctcctctggctttacgaagaagtggagaaaccattgagtcgcgtgctcgcgcatatggaagctaccggtgtcaaattagacgtggcgtatttggagaatctcagccttgaagttgctgcccacatgcgccgcttggaggaagaagtattccgtttagcaggccgttcctttcgccttaactctcgcgatcagttagaacgtgtgttgttcgatgaacttggtctccctcctatcggcaagacagagaagaccggtaaacgtagcacttcagcggcggttttagaagctcttcgcgaagtccatcccattgtggacaagatcgggcagtaccgcgaaatggcgaaattgaaaggcacctatattgaccgtcttccggcattagtccacccgaaaacgggacgcctccatacccgcttcaaccaaacagccacggcgaccggtcgtttgtcctcctctgatccaaaccttcagaatattccagtacgtaccccattgggccagaagatccgccgtgcgtttgtagctgaggagggttggcgtttagtggccctcgattatcgtcaaattgaattacgtgtccttgcccatctttctggcgatgagaacctcatccgcgtgtttcaggaaggcaaagacattcacactcaaacggcaagctggatgtttggattatcagctgaagcgatcgatcctttgatgcgtcgtgcagcgaagaccatcaatttcggtgttctctacggtatgagtgcctttcgtttgtcgcaggaattaggcattccctatgaagaagctcaggcgttcattcagaaatactttcaaagctatcccaaagttaaagcatggatcgagaagactctccgtgaaggccgcacacgtggttacgtagagaccttatttggacgtcgccgctatgttcccgatttaaacgctcgcgtgaaaggcaagcgtgaagccgccgaacgcatggcgttcaacatgcctgtacagggcacggcagctgacctcatgaaacttgcaatggtgcgcctttttccacaattgcgtgaagttggtgcccgcatgctcttgcaggtccacgatgaactcttgttagaagcgccaaaagagcgtgcggaagaggtggcagccctcgcgaaagaagttatggaaggcgtgtggcccttagcggtgcctcttgaagtcgaagttggtattggcgaggattggctggctgccaaagga

SEQ ID NO: 6162 - protein, 841 aa, synthetic construct
  REGION 1..841: note = Variant of DNA polymerase I from Thermus sp. strain 2.9
MHHHHHHGGSGVLPVFEPKGRVLLVDGHHLAYRNFFALKGLTTSLGEPVQGVYGFAKSLLKALKEDGDVVIVVFDAKAPSFRHEAYEAYKAGRAPTPEDFPRQLALMKELVDLLGLERLEVPGFEADDVLATLAKKAEREGYEVQILTADRDLFQLLSPRISVLHPEGHRITPEWLWEKYGLRPEQWVDFRALAGDPSDNIPGVKGIGEKTALKLLKEWGSLENLLKNLDQVKPESVREKILAHLEDLKLSRELSRVRTDLPLEVDFGRRREPDWEGLKAFLERLEFGSLLHEFGLLESPLLAEEAPWPPPEGAFLGYRLSRPEPMWAELLALAASAQGRVYRAEDPHGALRGLFEVRGLLAKDLAVVALREGLDLPPTDDPMLLAYLLDPSNTTPEGVARRYGGEWTEDAAKRALLAERLHENLLGRLQGEERLLWLYEEVEKPLSRVLAHMEATGVKLDVAYLENLSLEVAAHMRRLEEEVFRLAGRSFRLNSRDQLERVLFDELGLPPIGKTEKTGKRSTSAAVLEALREVHPIVDKIGQYREMAKLKGTYIDRLPALVHPKTGRLHTRFNQTATATGRLSSSDPNLQNIPVRTPLGQKIRRAFVAEEGWRLVALDYRQIELRVLAHLSGDENLIRVFQEGKDIHTQTASWMFGLSAEAIDPLMRRAAKTINFGVLYGMSAFRLSQELGIPYEEAQAFIQKYFQSYPKVKAWIEKTLREGRTRGYVETLFGRRRYVPDLNARVKGKREAAERMAFNMPVQGTAADLMKLAMVRLFPQLREVGARMLLQVHDELLLEAPKERAEEVAALAKEVMEGVWPLAVPLEVEVGIGEDWLAAKG

SEQ ID NO: 6163 - DNA, 2523 bp, synthetic construct
  misc_feature 1..2523: note = Variant of DNA polymerase I from Thermus sp. strain 2.9
  source 1..2523: mol_type = other DNA
atgcaccatcatcatcatcatggcggtagcggcgtgttaccggtgttcgagcctaaaggtcgcgtgcttctggttgatggccatcatctcgcgtatcgtaacttctttgccctgaaaggattaaccaccagcctgggcgagccggtacagggtgtctacggctttgcaaagtcgctcctgaaagctctgaaagaagacggtgatgtggtgattgttgtctttgatgcgaaagcgccaagttttcgccacgaagcgtacgaagcttacaaagccgggcgtgctccaacgccggaagactttcctcgccaattggcgcttatgaaggaattagtggatttgcttggcctcgaacgcttggaagttcccggtttcgaggcagacgacgtattagcgactctcgcaaagaaagccgaacgtgagggctatgaagtccagatcttgacagcagatcgcgatcttttccagcttttatctccgcgcatctcggtgttacacccggaagggcatcgtatcaccccggaatggctctgggagaaatatggtttgcgtcccgaacaatgggtggattttcgcgccttagcaggcgatccgagcgacaatattccgggagttaaaggtatcggcgagaagacggcgctcaagctccttaaagaatgggggtcgttggagaacttgcttaagaatttagatcaggtcaaaccagagtcagtgcgtgagaagattcttgctcacctcgaagacctcaaattaagccgcgaattgtcccgtgtacgcaccgatttgccgctcgaagttgatttcggtcgccgccgcgaacctgactgggagggtcttaaagcgtttttagagcgtcttgaatttggttcgctcttgcatgaattcggccttttagaaagcccgttactggccgaagaagcaccttggccaccgcccgagggcgcgtttttaggttaccgtttgagtcgcccggaaccgatgtgggccgaattactggctcttgcagcgtctgcccagggacgtgtgtatcgcgcggaagaccctcatggtgcgctccgcggcctcttcgaagtccgtggactccttgccaaagacttagctgttgttgcattgcgcgaaggtcttgatttacctccgactgatgatccaatgcttcttgcgtacctcttggacccgtcaaacacgacgcccgaaggcgtagcccgtcgttacggcggcgagtggaccgaagatgcagcgaaacgcgcgttattggccgaacgtttgcacgaaaatttattaggacgtttgcaaggcgaggaacgtctcctctggctttacgaagaagtggagaaaccattgagtcgcgtgctcgcgcatatggaagctaccggtgtcaaattagacgtggcgtatttggagaatctcagccttgaagttgctgcccacatgcgccgcttggaggaagaagtattccgtttagcaggccgttcctttcgccttaactctcgcgatcagttagaacgtgtgttgttcgatgaacttggtctccctcctatcggcaagacagagaagaccggtaaacgtagcacttcagcggcggttttagaagctcttcgcgaagtccatcccattgtggacaagatcttgcagtaccgcgaaatggcggctttgaaaggcacctatattgaccgtcttccggcattagtccacccgaaaacgggacgcctccatacccgcttcaaccaaacagccacggcgaccggtcgtttgtcctcctctgatccaaaccttcagaatattccagtacgtaccccattgggccagaagatccgccgtgcgtttgtagctgaggagggttggcgtttagtggccctcgattatcgtcaaattgaattacgtgtccttgcccatctttctggcgatgagaacctcatccgcgtgtttcaggaaggcaaagacattcacactcaaacggcaagctggatgtttggattatcagctgaagcgatcgatcctttgatgcgtcgtgcagcgaagaccatcaatttcggtgttctctacggtatgagtgcctttcgtttgtcgcaggaattaggcattccctatgaagaagctcaggcgttcattcagaaatactttcaaagctatcccaaagttaaagcatggatcgagaagactctccgtgaaggccgcacacgtggttacgtagagaccttatttggacgtcgccgctatgttcccgatttaaacgctcgcgtgaaaggcaagcgtgaagccgccgaacgcatggcgttcaacatgcctgtacagggcacggcagctgacctcatgaaacttgcaatggtgcgcctttttccacaattgcgtgaagttggtgcccgcatgctcttgcaggtccacgatgaactcttgttagaagcgccaaaagagcgtgcggaagaggtggcagccctcgcgaaagaagttatggaaggcgtgtggcccttagcggtgcctcttgaagtcgaagttggtattggcgaggattggctggctgccaaagga

SEQ ID NO: 6164 - protein, 841 aa, synthetic construct
  REGION 1..841: note = Variant of DNA polymerase I from Thermus sp. strain 2.9
MHHHHHHGGSGVLPVFEPKGRVLLVDGHHLAYRNFFALKGLTTSLGEPVQGVYGFAKSLLKALKEDGDVVIVVFDAKAPSFRHEAYEAYKAGRAPTPEDFPRQLALMKELVDLLGLERLEVPGFEADDVLATLAKKAEREGYEVQILTADRDLFQLLSPRISVLHPEGHRITPEWLWEKYGLRPEQWVDFRALAGDPSDNIPGVKGIGEKTALKLLKEWGSLENLLKNLDQVKPESVREKILAHLEDLKLSRELSRVRTDLPLEVDFGRRREPDWEGLKAFLERLEFGSLLHEFGLLESPLLAEEAPWPPPEGAFLGYRLSRPEPMWAELLALAASAQGRVYRAEDPHGALRGLFEVRGLLAKDLAVVALREGLDLPPTDDPMLLAYLLDPSNTTPEGVARRYGGEWTEDAAKRALLAERLHENLLGRLQGEERLLWLYEEVEKPLSRVLAHMEATGVKLDVAYLENLSLEVAAHMRRLEEEVFRLAGRSFRLNSRDQLERVLFDELGLPPIGKTEKTGKRSTSAAVLEALREVHPIVDKILQYREMAALKGTYIDRLPALVHPKTGRLHTRFNQTATATGRLSSSDPNLQNIPVRTPLGQKIRRAFVAEEGWRLVALDYRQIELRVLAHLSGDENLIRVFQEGKDIHTQTASWMFGLSAEAIDPLMRRAAKTINFGVLYGMSAFRLSQELGIPYEEAQAFIQKYFQSYPKVKAWIEKTLREGRTRGYVETLFGRRRYVPDLNARVKGKREAAERMAFNMPVQGTAADLMKLAMVRLFPQLREVGARMLLQVHDELLLEAPKERAEEVAALAKEVMEGVWPLAVPLEVEVGIGEDWLAAKG

SEQ ID NO: 6165 - DNA, 2523 bp, synthetic construct
  misc_feature 1..2523: note = Variant of DNA polymerase I from Thermus sp. strain 2.9
  source 1..2523: mol_type = other DNA
atgcaccatcatcatcatcatggcggtagcggcgtgttaccggtgttcgagcctaaaggtcgcgtgcttctggttgatggccatcatctcgcgtatcgtaacttctttgccctgaaaggattaaccaccagcctgggcgagccggtacagggtgtctacggctttgcaaagtcgctcctgaaagctctgaaagaagacggtgatgtggtgattgttgtctttgatgcgaaagcgccaagttttcgccacgaagcgtacgaagcttacaaagccgggcgtgctccaacgccggaagactttcctcgccaattggcgcttatgaaggaattagtggatttgcttggcctcgaacgcttggaagttcccggtttcgaggcagacgacgtattagcgactctcgcaaagaaagccgaacgtgagggctatgaagtccagatcttgacagcagatcgcgatcttttccagcttttatctccgcgcatctcggtgttacacccggaagggcatcgtatcaccccggaatggctctgggagaaatatggtttgcgtcccgaacaatgggtggattttcgcgccttagcaggcgatccgagcgacaatattccgggagttaaaggtatcggcgagaagacggcgctcaagctccttaaagaatgggggtcgttggagaacttgcttaagaatttagatcaggtcaaaccagagtcagtgcgtgagaagattcttgctcacctcgaagacctcaaattaagccgcgaattgtcccgtgtacgcaccgatttgccgctcgaagttgatttcggtcgccgccgcgaacctgactgggagggtcttaaagcgtttttagagcgtcttgaatttggttcgctcttgcatgaattcggccttttagaaagcccgttactggccgaagaagcaccttggccaccgcccgagggcgcgtttttaggttaccgtttgagtcgcccggaaccgatgtgggccgaattactggctcttgcagcgtctgcccagggacgtgtgtatcgcgcggaagaccctcatggtgcgctccgcggcctcttcgaagtccgtggactccttgccaaagacttagctgttgttgcattgcgcgaaggtcttgatttacctccgactgatgatccaatgcttcttgcgtacctcttggacccgtcaaacacgacgcccgaaggcgtagcccgtcgttacggcggcgagtggaccgaagatgcagcgaaacgcgcgttattggccgaacgtttgcacgaaaatttattaggacgtttgcaaggcgaggaacgtctcctctggctttacgaagaagtggagaaaccattgagtcgcgtgctcgcgcatatggaagctaccggtgtcaaattagacgtggcgtatttggagaatctcagccttgaagttgctgcccacatgcgccgcttggaggaagaagtattccgtttagcaggccgttcctttcgccttaactctcgcgatcagttagaacgtgtgttgttcgatgaacttggtctccctcctatcggcaagacagagaagaccggtaaacgtagcacttcagcggcggttttagaagctcttcgcgaagtccatcccattgtggacaagatcgctcagtaccgcgaaatggcgaaattgaaaggcacctatattgaccgtcttccggcattagtccacccgaaaacgggacgcctccatacccgcttcaaccaaacagccacggcgaccggtcgtttgtcctcctctgatccaaaccttcagaatattccagtacgtaccccattgggccagaagatccgccgtgcgtttgtagctgaggagggttggcgtttagtggccctcgattatcgtcaaattgaattacgtgtccttgcccatctttctggcgatgagaacctcatccgcgtgtttcaggaaggcaaagacattcacactcaaacggcaagctggatgtttggattatcagctgaagcgatcgatcctttgatgcgtcgtgcagcgaagaccatcaatttcggtgttctctacggtatgagtgcctttcgtttgtcgcaggaattaggcattccctatgaagaagctcaggcgttcattcagaaatactttcaaagctatcccaaagttaaagcatggatcgagaagactctccgtgaaggccgcacacgtggttacgtagagaccttatttggacgtcgccgctatgttcccgatttaaacgctcgcgtgaaaggcaagcgtgaagccgccgaacgcatggcgttcaacatgcctgtacagggcacggcagctgacctcatgaaacttgcaatggtgcgcctttttccacaattgcgtgaagttggtgcccgcatgctcttgcaggtccacgatgaactcttgttagaagcgccaaaagagcgtgcggaagaggtggcagccctcgcgaaagaagttatggaaggcgtgtggcccttagcggtgcctcttgaagtcgaagttggtattggcgaggattggctggctgccaaagga

SEQ ID NO: 6166 - protein, 841 aa, synthetic construct
  REGION 1..841: note = Variant of DNA polymerase I from Thermus sp. strain 2.9
MHHHHHHGGSGVLPVFEPKGRVLLVDGHHLAYRNFFALKGLTTSLGEPVQGVYGFAKSLLKALKEDGDVVIVVFDAKAPSFRHEAYEAYKAGRAPTPEDFPRQLALMKELVDLLGLERLEVPGFEADDVLATLAKKAEREGYEVQILTADRDLFQLLSPRISVLHPEGHRITPEWLWEKYGLRPEQWVDFRALAGDPSDNIPGVKGIGEKTALKLLKEWGSLENLLKNLDQVKPESVREKILAHLEDLKLSRELSRVRTDLPLEVDFGRRREPDWEGLKAFLERLEFGSLLHEFGLLESPLLAEEAPWPPPEGAFLGYRLSRPEPMWAELLALAASAQGRVYRAEDPHGALRGLFEVRGLLAKDLAVVALREGLDLPPTDDPMLLAYLLDPSNTTPEGVARRYGGEWTEDAAKRALLAERLHENLLGRLQGEERLLWLYEEVEKPLSRVLAHMEATGVKLDVAYLENLSLEVAAHMRRLEEEVFRLAGRSFRLNSRDQLERVLFDELGLPPIGKTEKTGKRSTSAAVLEALREVHPIVDKIAQYREMAKLKGTYIDRLPALVHPKTGRLHTRFNQTATATGRLSSSDPNLQNIPVRTPLGQKIRRAFVAEEGWRLVALDYRQIELRVLAHLSGDENLIRVFQEGKDIHTQTASWMFGLSAEAIDPLMRRAAKTINFGVLYGMSAFRLSQELGIPYEEAQAFIQKYFQSYPKVKAWIEKTLREGRTRGYVETLFGRRRYVPDLNARVKGKREAAERMAFNMPVQGTAADLMKLAMVRLFPQLREVGARMLLQVHDELLLEAPKERAEEVAALAKEVMEGVWPLAVPLEVEVGIGEDWLAAKG

SEQ ID NO: 6167 - DNA, 2523 bp, synthetic construct
  misc_feature 1..2523: note = Variant of DNA polymerase I from Thermus sp. strain 2.9
  source 1..2523: mol_type = other DNA
atgcaccatcatcatcatcatggcggtagcggcgtgttaccggtgttcgagcctaaaggtcgcgtgcttctggttgatggccatcatctcgcgtatcgtaacttctttgccctgaaaggattaaccaccagcctgggcgagccggtacagggtgtctacggctttgcaaagtcgctcctgaaagctctgaaagaagacggtgatgtggtgattgttgtctttgatgcgaaagcgccaagttttcgccacgaagcgtacgaagcttacaaagccgggcgtgctccaacgccggaagactttcctcgccaattggcgcttatgaaggaattagtggatttgcttggcctcgaacgcttggaagttcccggtttcgaggcagacgacgtattagcgactctcgcaaagaaagccgaacgtgagggctatgaagtccagatcttgacagcagatcgcgatcttttccagcttttatctccgcgcatctcggtgttacacccggaagggcatcgtatcaccccggaatggctctgggagaaatatggtttgcgtcccgaacaatgggtggattttcgcgccttagcaggcgatccgagcgacaatattccgggagttaaaggtatcggcgagaagacggcgctcaagctccttaaagaatgggggtcgttggagaacttgcttaagaatttagatcaggtcaaaccagagtcagtgcgtgagaagattcttgctcacctcgaagacctcaaattaagccgcgaattgtcccgtgtacgcaccgatttgccgctcgaagttgatttcggtcgccgccgcgaacctgactgggagggtcttaaagcgtttttagagcgtcttgaatttggttcgctcttgcatgaattcggccttttagaaagcccgttactggccgaagaagcaccttggccaccgcccgagggcgcgtttttaggttaccgtttgagtcgcccggaaccgatgtgggccgaattactggctcttgcagcgtctgcccagggacgtgtgtatcgcgcggaagaccctcatggtgcgctccgcggcctcttcgaagtccgtggactccttgccaaagacttagctgttgttgcattgcgcgaaggtcttgatttacctccgactgatgatccaatgcttcttgcgtacctcttggacccgtcaaacacgacgcccgaaggcgtagcccgtcgttacggcggcgagtggaccgaagatgcagcgaaacgcgcgttattggccgaacgtttgcacgaaaatttattaggacgtttgcaaggcgaggaacgtctcctctggctttacgaagaagtggagaaaccattgagtcgcgtgctcgcgcatatggaagctaccggtgtcaaattagacgtggcgtatttggagaatctcagccttgaagttgctgcccacatgcgccgcttggaggaagaagtattccgtttagcaggccgttcctttcgccttaactctcgcgatcagttagaacgtgtgttgttcgatgaacttggtctccctcctatcggcaagacagagaagaccggtaaacgtagcacttcagcggcggttttagaagctcttcgcgaagtccatcccattgtggacaagatcttgcagtaccgcgaaatggcgacgttgaaaggcacctatattgaccgtcttccggcattagtccacccgaaaacgggacgcctccatacccgcttcaaccaaacagccacggcgaccggtcgtttgtcctcctctgatccaaaccttcagaatattccagtacgtaccccattgggccagaagatccgccgtgcgtttgtagctgaggagggttggcgtttagtggccctcgattatcgtcaaattgaattacgtgtccttgcccatctttctggcgatgagaacctcatccgcgtgtttcaggaaggcaaagacattcacactcaaacggcaagctggatgtttggattatcagctgaagcgatcgatcctttgatgcgtcgtgcagcgaagaccatcaatttcggtgttctctacggtatgagtgcctttcgtttgtcgcaggaattaggcattccctatgaagaagctcaggcgttcattcagaaatactttcaaagctatcccaaagttaaagcatggatcgagaagactctccgtgaaggccgcacacgtggttacgtagagaccttatttggacgtcgccgctatgttcccgatttaaacgctcgcgtgaaaggcaagcgtgaagccgccgaacgcatggcgttcaacatgcctgtacagggcacggcagctgacctcatgaaacttgcaatggtgcgcctttttccacaattgcgtgaagttggtgcccgcatgctcttgcaggtccacgatgaactcttgttagaagcgccaaaagagcgtgcggaagaggtggcagccctcgcgaaagaagttatggaaggcgtgtggcccttagcggtgcctcttgaagtcgaagttggtattggcgaggattggctggctgccaaagga

SEQ ID NO: 6168 - protein, 841 aa, synthetic construct
  REGION 1..841: note = Variant of DNA polymerase I from Thermus sp. strain 2.9
MHHHHHHGGSGVLPVFEPKGRVLLVDGHHLAYRNFFALKGLTTSLGEPVQGVYGFAKSLLKALKEDGDVVIVVFDAKAPSFRHEAYEAYKAGRAPTPEDFPRQLALMKELVDLLGLERLEVPGFEADDVLATLAKKAEREGYEVQILTADRDLFQLLSPRISVLHPEGHRITPEWLWEKYGLRPEQWVDFRALAGDPSDNIPGVKGIGEKTALKLLKEWGSLENLLKNLDQVKPESVREKILAHLEDLKLSRELSRVRTDLPLEVDFGRRREPDWEGLKAFLERLEFGSLLHEFGLLESPLLAEEAPWPPPEGAFLGYRLSRPEPMWAELLALAASAQGRVYRAEDPHGALRGLFEVRGLLAKDLAVVALREGLDLPPTDDPMLLAYLLDPSNTTPEGVARRYGGEWTEDAAKRALLAERLHENLLGRLQGEERLLWLYEEVEKPLSRVLAHMEATGVKLDVAYLENLSLEVAAHMRRLEEEVFRLAGRSFRLNSRDQLERVLFDELGLPPIGKTEKTGKRSTSAAVLEALREVHPIVDKILQYREMATLKGTYIDRLPALVHPKTGRLHTRFNQTATATGRLSSSDPNLQNIPVRTPLGQKIRRAFVAEEGWRLVALDYRQIELRVLAHLSGDENLIRVFQEGKDIHTQTASWMFGLSAEAIDPLMRRAAKTINFGVLYGMSAFRLSQELGIPYEEAQAFIQKYFQSYPKVKAWIEKTLREGRTRGYVETLFGRRRYVPDLNARVKGKREAAERMAFNMPVQGTAADLMKLAMVRLFPQLREVGARMLLQVHDELLLEAPKERAEEVAALAKEVMEGVWPLAVPLEVEVGIGEDWLAAKG

SEQ ID NO: 6169 - DNA, 2523 bp, synthetic construct
  misc_feature 1..2523: note = Variant of DNA polymerase I from Thermus sp. strain 2.9
  source 1..2523: mol_type = other DNA
atgcaccatcatcatcatcatggcggtagcggcgtgttaccggtgttcgagcctaaaggtcgcgtgcttctggttgatggccatcatctcgcgtatcgtaacttctttgccctgaaaggattaaccaccagcctgggcgagccggtacagggtgtctacggctttgcaaagtcgctcctgaaagctctgaaagaagacggtgatgtggtgattgttgtctttgatgcgaaagcgccaagttttcgccacgaagcgtacgaagcttacaaagccgggcgtgctccaacgccggaagactttcctcgccaattggcgcttatgaaggaattagtggatttgcttggcctcgaacgcttggaagttcccggtttcgaggcagacgacgtattagcgactctcgcaaagaaagccgaacgtgagggctatgaagtccagatcttgacagcagatcgcgatcttttccagcttttatctccgcgcatctcggtgttacacccggaagggcatcgtatcaccccggaatggctctgggagaaatatggtttgcgtcccgaacaatgggtggattttcgcgccttagcaggcgatccgagcgacaatattccgggagttaaaggtatcggcgagaagacggcgctcaagctccttaaagaatgggggtcgttggagaacttgcttaagaatttagatcaggtcaaaccagagtcagtgcgtgagaagattcttgctcacctcgaagacctcaaattaagccgcgaattgtcccgtgtacgcaccgatttgccgctcgaagttgatttcggtcgccgccgcgaacctgactgggagggtcttaaagcgtttttagagcgtcttgaatttggttcgctcttgcatgaattcggccttttagaaagcccgttactggccgaagaagcaccttggccaccgcccgagggcgcgtttttaggttaccgtttgagtcgcccggaaccgatgtgggccgaattactggctcttgcagcgtctgcccagggacgtgtgtatcgcgcggaagaccctcatggtgcgctccgcggcctcttcgaagtccgtaccctccttgccaaagacttagctgttgttgcattgcgcgaaggtcttgatttacctccgactgatgatccaatgcttcttgcgtacctcttggacccgtcaaacacgacgcccgaaggcgtagcccgtcgttacggcggcgagtggtgggaagatgcagccaaacgcgcgttattggccgaacgtttgcacgaaaatttattaggacgtttgcaaggcgaggaacgtctcctctggctttacgaagaagtggagaaaccattgagtcgcgtgctcgcgcatatggaagctaccggtgtcaaattagacgtggcgtatttggagaatctcagccttgaagttgctgcccacatgcgccgcttggaggaagaagtattccgtttagcaggccgttcctttcgccttaactctcgcgatcagttagaacgtgtgttgttcgatgaacttggtctccctcctatcggcaagacagagaagaccggtaaacgtagcacttcagcggcggttttagaagctcttcgcgaagtccatcccattgtggacaagatcttgcagtaccgcgaaatggcgaaattgaaaggcacctatattgaccgtcttccggcattagtccacccgaaaacgggacgcctccatacccgcttcaaccaaacagccacggcgaccggtcgtttgtcctcctctgatccaaaccttcagaatattccagtacgtaccccattgggccagaagatccgccgtgcgtttgtagctgaggagggttggcgtttagtggccctcgattatcgtcaaattgaattacgtgtccttgcccatctttctggcgatgagaacctcatccgcgtgtttcaggaaggcaaagacattcacactcaaacggcaagctggatgtttggattatcagctgaagcgatcgatcctttgatgcgtcgtgcagcgaagaccatcaatttcggtgttctctacggtatgagtgcctttcgtttgtcgcaggaattaggcattcccctggaagaagctcaggctttcattcagaaatactttcaaagctatcccaaagttaaagcatggatcgagaagactctccgtgaaggccgcacacgtggttacgtagagaccttatttggacgtcgccgctatgttcccgatttaaacggtcgcgtgaaaggcaagcgtgaagccgccgaacgcatggcgttcaacatgcctgtacagggcacggcagctgacctcatgaaacttgcaatggtgcgcctttttccacaattgcgtgaagttggtgcccgcatgctcttgcaggtccacgatgaactcttgttagaagcgccaaaagagcgtgcggaagaggtggcagccctcgcgaaagaagttatggaaggcgtgtggcccttagcggtgcctcttgaagtcgaagttggtattggcgaggattggctggctgccaaagga

SEQ ID NO: 6170 - protein, 841 aa, synthetic construct
  REGION 1..841: note = Variant of DNA polymerase I from Thermus sp. strain 2.9
MHHHHHHGGSGVLPVFEPKGRVLLVDGHHLAYRNFFALKGLTTSLGEPVQGVYGFAKSLLKALKEDGDVVIVVFDAKAPSFRHEAYEAYKAGRAPTPEDFPRQLALMKELVDLLGLERLEVPGFEADDVLATLAKKAEREGYEVQILTADRDLFQLLSPRISVLHPEGHRITPEWLWEKYGLRPEQWVDFRALAGDPSDNIPGVKGIGEKTALKLLKEWGSLENLLKNLDQVKPESVREKILAHLEDLKLSRELSRVRTDLPLEVDFGRRREPDWEGLKAFLERLEFGSLLHEFGLLESPLLAEEAPWPPPEGAFLGYRLSRPEPMWAELLALAASAQGRVYRAEDPHGALRGLFEVRTLLAKDLAVVALREGLDLPPTDDPMLLAYLLDPSNTTPEGVARRYGGEWWEDAAKRALLAERLHENLLGRLQGEERLLWLYEEVEKPLSRVLAHMEATGVKLDVAYLENLSLEVAAHMRRLEEEVFRLAGRSFRLNSRDQLERVLFDELGLPPIGKTEKTGKRSTSAAVLEALREVHPIVDKILQYREMAKLKGTYIDRLPALVHPKTGRLHTRFNQTATATGRLSSSDPNLQNIPVRTPLGQKIRRAFVAEEGWRLVALDYRQIELRVLAHLSGDENLIRVFQEGKDIHTQTASWMFGLSAEAIDPLMRRAAKTINFGVLYGMSAFRLSQELGIPLEEAQAFIQKYFQSYPKVKAWIEKTLREGRTRGYVETLFGRRRYVPDLNGRVKGKREAAERMAFNMPVQGTAADLMKLAMVRLFPQLREVGARMLLQVHDELLLEAPKERAEEVAALAKEVMEGVWPLAVPLEVEVGIGEDWLAAKG

SEQ ID NO: 6171 - DNA, 2523 bp, synthetic construct
  misc_feature 1..2523: note = Variant of DNA polymerase I from Thermus sp. strain 2.9
  source 1..2523: mol_type = other DNA
atgcaccatcatcatcatcatggcgatagcggcgtgttaccggtgttcgagcctaaaggtcgcgtgcttctggttgatggccatcatctcgcgtatcgtaacttctttgccctgaaaggattaaccaccagcctgggcgagccggtacagggtgtctacggctttgcaaagtcgctcctgaaagctctgaaagaagacggtgatgtggtgattgttgtctttgatgcgaaagcgccaagttttcgccacgaagcgtacgaagcttacaaagccgggcgtgctccaacgccggaagactttcctcgccaattggcgcttatgaaggaattagtggatttgcttggcctcgaacgcttggaagttcccggtttcgaggcagacgacgtattagcgactctcgcaaagaaagccgaacgtgagggctatgaagtccagatcttgacagcagatcgcgatcttttccagcttttatctccgcgcatctcggtgttacacccggaagggcatcgtatcaccccggaatggctctgggagaaatatggtttgcgtcccgaacaatgggtggattttcgcgccttagcaggcgatccgagcgacaatattccgggagttaaaggtatcggcgagaagacggcgctcaagctccttaaagaatgggggtcgttggagaacttgcttaagaatttagatcaggtcaaaccagagtcagtgcgtgagaagattcttgctcacctcgaagacctcaaattaagccgcgaattgtcccgtgtacgcaccgatttgccgctcgaagttgatttcggtcgccgccgcgaacctgactgggagggtcttaaagcgtttttagagcgtcttgaatttggttcgctcttgcatgaattcggccttttagaaagcccgttactggccgaagaagcaccttggccaccgcccgagggcgcgtttttaggttaccgtttgagtcgcccggaaccgatgtgggccgaattactggctcttgcagcgtctgcccagggacgtgtgtatcgcgcggaagaccctcatggtgcgctccgcggcctcttcgaagtccgtggactccttgccaaagacttagctgttgttgcattgcgcgaaggtcttgatttacctccgactgatgatccaatgcttcttgcgtacctcttggacccgtcaaacacgacgcccgaaggcgtagcccgtcgttacggcggcgagtggaccgaagatgcagcgaaacgcgcgttattggccgaacgtttgcacgaaaatttattaggacgtttgcaaggcgaggaacgtctcctctggctttacgaagaagtggagaaaccattgagtcgcgtgctcgcgcatatggaagctaccggtgtcaaattagacgtggcgtatttggagaatctcagccttgaagttgctgcccacatgcgccgcttggaggaagaagtattccgtttagcaggccgttcctttcgccttaactctcgcgatcagttagaacgtgtgttgttcgatgaacttggtctccctcctatcggcaagacagagaagaccggtaaacgtagcacttcagcggcggttttagaagctcttcgcgaagtccatcccattgtggacaagatcttgcagtaccgcgaaatggcgaaattgaaaggcacctatattgaccgtcttccggcattagtccacccgaaaacgggacgcctccatacccgcttcaaccaaacagccacggcgaccggtcgtttgtcctcctctgatccaaaccttcagaatattccagtacgtaccccattgggccagaagatccgccgtgcgtttgtagctgaggagggttggcgtttagtggccctcgattatcgtcaaattgaattacgtgtccttgcccatctttctggcgatgagaacctcatccgcgtgtttcaggaaggcaaagacattcacactcaaacggcaagctggatgtttggattatcagctgaagcgatcgatcctttgatgcgtcgtgcagcgaagaccatcaatttcggtgttctctacggtatgagtgcctttcgtttgtcgcaggaatcgggcattccctatgaagaagctcaggcgttcattcagaaatactttcaaagctatcccaaagttaaagcatggatcgagaagactctccgtgaaggccgcacacgtggttacgtagagaccttatttggacgtcgccgctatgttcccgatttaaacgctcgcgtgaaaggcaagcgtgaagccgccgaacgcatggcgttcaacatgcctgtacagggcacggcagctgacctcatgaaacttgcaatggtgcgcctttttccacaattgcgtgaagttggtgcccgcatgctcttgcaggtccacgatgaactcttgttagaagcgccaaaagagcgtgcggaagaggtggcagccctcgcgaaagaagttatggaaggcgtgtggcccttagcggtgcctcttgaagtcgaagttggtattggcgaggattggctggctgccaaagga

SEQ ID NO: 6172 - protein, 841 aa, synthetic construct
  REGION 1..841: note = Variant of DNA polymerase I from Thermus sp. strain 2.9
MHHHHHHGDSGVLPVFEPKGRVLLVDGHHLAYRNFFALKGLTTSLGEPVQGVYGFAKSLLKALKEDGDVVIVVFDAKAPSFRHEAYEAYKAGRAPTPEDFPRQLALMKELVDLLGLERLEVPGFEADDVLATLAKKAEREGYEVQILTADRDLFQLLSPRISVLHPEGHRITPEWLWEKYGLRPEQWVDFRALAGDPSDNIPGVKGIGEKTALKLLKEWGSLENLLKNLDQVKPESVREKILAHLEDLKLSRELSRVRTDLPLEVDFGRRREPDWEGLKAFLERLEFGSLLHEFGLLESPLLAEEAPWPPPEGAFLGYRLSRPEPMWAELLALAASAQGRVYRAEDPHGALRGLFEVRGLLAKDLAVVALREGLDLPPTDDPMLLAYLLDPSNTTPEGVARRYGGEWTEDAAKRALLAERLHENLLGRLQGEERLLWLYEEVEKPLSRVLAHMEATGVKLDVAYLENLSLEVAAHMRRLEEEVFRLAGRSFRLNSRDQLERVLFDELGLPPIGKTEKTGKRSTSAAVLEALREVHPIVDKILQYREMAKLKGTYIDRLPALVHPKTGRLHTRFNQTATATGRLSSSDPNLQNIPVRTPLGQKIRRAFVAEEGWRLVALDYRQIELRVLAHLSGDENLIRVFQEGKDIHTQTASWMFGLSAEAIDPLMRRAAKTINFGVLYGMSAFRLSQESGIPYEEAQAFIQKYFQSYPKVKAWIEKTLREGRTRGYVETLFGRRRYVPDLNARVKGKREAAERMAFNMPVQGTAADLMKLAMVRLFPQLREVGARMLLQVHDELLLEAPKERAEEVAALAKEVMEGVWPLAVPLEVEVGIGEDWLAAKG

SEQ ID NO: 6173 - DNA, 2523 bp, synthetic construct
  misc_feature 1..2523: note = Variant of DNA polymerase I from Thermus sp. strain 2.9
  source 1..2523: mol_type = other DNA
atgcaccatcatcatcatcatggcggtagcggcgtgttaccggtgttcgagcctaaaggtcgcgtgcttctggttgatggccatcatctcgcgtatcgtaacttctttgccctgaaaggattaaccaccagcctgggcgagccggtacagggtgtctacggctttgcaaagtcgctcctgaaagctctgaaagaagacggtgatgtggtgattgttgtctttgatgcgaaagcgccaagttttcgccacgaagcgtacgaagcttacaaagccgggcgtgctccaacgccggaagactttcctcgccaattggcgcttatgaaggaattagtggatttgcttggcctcgaacgcttggaagttcccggtttcgaggcagacgacgtattagcgactctcgcaaagaaagccgaacgtgagggctatgaagtccagatcttgacagcagatcgcgatcttttccagcttttatctccgcgcatctcggtgttacacccggaagggcatcgtatcaccccggaatggctctgggagaaatatggtttgcgtcccgaacaatgggtggattttcgcgccttagcaggcgatccgagcgacaatattccgggagttaaaggtatcggcgagaagacggcgctcaagctccttaaagaatgggggtcgttggagaacttgcttaagaatttagatcaggtcaaaccagagtcagtgcgtgagaagattcttgctcacctcgaagacctcaaattaagccgcgaattgtcccgtgtacgcaccgatttgccgctcgaagttgatttcggtcgccgccgcgaacctgactgggagggtcttaaagcgtttttagagcgtcttgaatttggttcgctcttgcatgaattcggccttttagaaagcccgttactggccgaagaagcaccttggccaccgcccgagggcgcgtttttaggttaccgtttgagtcgcccggaaccgatgtgggccgaattactggctcttgcagcgtctgcccagggacgtgtgtatcgcgcggaagaccctcatggtgcgctccgcggcctcttcgaagtccgtggactccttgccaaagacttagctgttgttgcattgcgcgaaggtcttgatttacctccgactgatgatccaatgcttcttgcgtacctcttggacccgtcaaacacgacgcccgaaggcgtagcccgtcgttacggcggcgagtggaccgaagatgcagcgaaacgcgcgttattggccgaacgtttgcacgaaaatttattaggacgtttgcaaggcgaggaacgtctcctctggctttacgaagaagtggagaaaccattgagtcgcgtgctcgcgcatatggaagctaccggtgtcaaattagacgtggcgtatttggagaatctcagccttgaagttgctgcccacatgcgccgcttggaggaagaagtattccgtttagcaggccgttcctttcgccttaactctcgcgatcagttagaacgtgtgttgttcgatgaacttggtctccctcctatcggcaagacagagaagaccggtgtgcgtagcacttcagcggcggttttagaagctcttcgcgaagtccatcccattgtggacaagatcttgcagtaccgcgaaatggcgaaattgaaaggcacctatattgaccgtcttccggcattagtccacccgaaaacgggacgcctccatacccgcttcaaccaaacagccacggcgaccggtcgtttgtcctcctctgatccaaaccttcagaatattccagtacgtaccccattgggccagaagatccgccgtgcgtttgtagctgaggagggttggcgtttagtggccctcgattatcgtcaaattgaattacgtgtccttgcccatctttctggcgatgagaacctcatccgcgtgtttcaggaaggcaaagacattcacactcaaacggcaagctggatgtttggattatcagctgaagcgatcgatcctttgatgcgtcgtgcagcgaagaccatcaatttcggtgttctctacggtatgagtgcctttcgtttgtcgcaggaattaggcattccctatgaagaagctcaggcgttcattcagaaatactttcaaagctatcccaaagttaaagcatggatcgagaagactctccgtgaaggccgcacacgtggttacgtagagaccttatttggacgtcgccgctatgttcccgatttaaacgctcgcgtgaaaggcaagcgtgaagccgccgaacgcatggcgttcaacatgcctgtacagggcacggcagctgacctcatgaaacttgcaatggtgcgcctttttccacaattgcgtgaagttggtgcccgcatgctcttgcaggtccacgatgaactcttgttagaagcgccaaaagagcgtgcggaagaggtggcagccctcgcgaaagaagttatggaaggcgtgtggcccttagcggtgcctcttgaagtcgaagttggtattggcgaggattggctggctgccaaagga

SEQ ID NO: 6174 - protein, 841 aa, synthetic construct
  REGION 1..841: note = Variant of DNA polymerase I from Thermus sp. strain 2.9
MHHHHHHGGSGVLPVFEPKGRVLLVDGHHLAYRNFFALKGLTTSLGEPVQGVYGFAKSLLKALKEDGDVVIVVFDAKAPSFRHEAYEAYKAGRAPTPEDFPRQLALMKELVDLLGLERLEVPGFEADDVLATLAKKAEREGYEVQILTADRDLFQLLSPRISVLHPEGHRITPEWLWEKYGLRPEQWVDFRALAGDPSDNIPGVKGIGEKTALKLLKEWGSLENLLKNLDQVKPESVREKILAHLEDLKLSRELSRVRTDLPLEVDFGRRREPDWEGLKAFLERLEFGSLLHEFGLLESPLLAEEAPWPPPEGAFLGYRLSRPEPMWAELLALAASAQGRVYRAEDPHGALRGLFEVRGLLAKDLAVVALREGLDLPPTDDPMLLAYLLDPSNTTPEGVARRYGGEWTEDAAKRALLAERLHENLLGRLQGEERLLWLYEEVEKPLSRVLAHMEATGVKLDVAYLENLSLEVAAHMRRLEEEVFRLAGRSFRLNSRDQLERVLFDELGLPPIGKTEKTGVRSTSAAVLEALREVHPIVDKILQYREMAKLKGTYIDRLPALVHPKTGRLHTRFNQTATATGRLSSSDPNLQNIPVRTPLGQKIRRAFVAEEGWRLVALDYRQIELRVLAHLSGDENLIRVFQEGKDIHTQTASWMFGLSAEAIDPLMRRAAKTINFGVLYGMSAFRLSQELGIPYEEAQAFIQKYFQSYPKVKAWIEKTLREGRTRGYVETLFGRRRYVPDLNARVKGKREAAERMAFNMPVQGTAADLMKLAMVRLFPQLREVGARMLLQVHDELLLEAPKERAEEVAALAKEVMEGVWPLAVPLEVEVGIGEDWLAAKG

SEQ ID NO: 6175 - DNA, 2523 bp, synthetic construct
  misc_feature 1..2523: note = Variant of DNA polymerase I from Thermus sp. strain 2.9
  source 1..2523: mol_type = other DNA
atgcaccatcatcatcatcatggcggtagcggcgtgttaccggtgttcgagcctaaaggtcgcgtgcttctggttgatggccatcatctcgcgtatcgtaacttctttgccctgaaaggattaaccaccagcctgggcgagccggtacagggtgtctacggctttgcaaagtcgctcctgaaagctctgaaagaagacggtgatgtggtgattgttgtctttgatgcgaaagcgccaagttttcgccacgaagcgtacgaagcttacaaagccgggcgtgctccaacgccggaagactttcctcgccaattggcgcttatgaaggaattagtggatttgcttggcctcgaacgcttggaagttcccggtttcgaggcagacgacgtattagcgactctcgcaaagaaagccgaacgtgagggctatgaagtccagatcttgacagcagatcgcgatcttttccagcttttatctccgcgcatctcggtgttacacccggaagggcatcgtatcaccccggaatggctctgggagaaatatggtttgcgtcccgaacaatgggtggattttcgcgccttagcaggcgatccgagcgacaatattccgggagttaaaggtatcggcgagaagacggcgctcaagctccttaaagaatgggggtcgttggagaacttgcttaagaatttagatcaggtcaaaccagagtcagtgcgtgagaagattcttgctcacctcgaagacctcaaattaagccgcgaattgtcccgtgtacgcaccgatttgccgctcgaagttgatttcggtcgccgccgcgaacctgactgggagggtcttaaagcgtttttagagcgtcttgaatttggttcgctcttgcatgaattcggccttttagaaagcccgttactggccgaagaagcaccttggccaccgcccgagggcgcgtttttaggttaccgtttgagtcgcccggaaccgatgtgggccgaattactggctcttgcagcgtctgcccagggacgtgtgtatcgcgcggaagaccctcatggtgcgctccgcggcctcttcgaagtccgtaccctccttgccaaagacttagctgttgttgcattgcgcgaaggtcttgatttacctccgactgatgatccaatgcttcttgcgtacctcttggacccgtcaaacacgacgcccgaaggcgtagcccgtcgttacggcggcgagtggtgggaagatgcagccaaacgcgcgttattggccgaacgtttgcacgaaaatttattaggacgtttgcaaggcgaggaacgtctcctctggctttacgaagaagtggagaaaccattgagtcgcgtgctcgcgcatatggaagctaccggtgtcaaattagacgtggcgtatttggagaatctcagccttgaagttgctgcccacatgcgccgcttggaggaagaagtattccgtttagcaggccgttcctttcgccttaactctcgcgatcagttagaacgtgtgttgttcgatgaacttggtctccctcctatcggcaagacagagaagaccggtaaacgtagcacttcagcggcggttttagaagctcttcgcgaagtccatcccattgtggacaagatcttgcagtaccgcgaaatggcgaaattgaaaggcacctatattgaccgtcttccggcattagtccacccgaaaacgggacgcctccatacccgcttcaaccaaacagccacggcgaccggtcgtttgtcctcctctgatccaaaccttcagaatattccagtacgtaccccattgggccagaagatccgccgtgcgtttgtagctgaggagggttggcgtttagtggccctcgattatcgtcaaattgaattacgtgtccttgcccatctttctggcgatgagaacctcatccgcgtgtttcaggaaggcaaagacattcacactcaaacggcaagctggatgtttggattatcagctgaagcgatcgatcctttgatgcgtcgtgcagcgaagaccatcaatttcggtgttctctacggtatgagtgcctttcgtttgtcgcaggaattaggcattcccctggaagaagctcagggtttcattcagaaatactttcaaagctatcccaaagttaaagcatggatcgagaagactctccgtgaaggccgcacacgtggttacgtagagaccttatttggacgtcgccgctatgttcccgatttaaacggtcgcgtgaaaggcaagcgtgaagccgccgaacgcatggcgttcaacatgcctgtacagggcacggcagctgacctcatgaaacttgcaatggtgcgcctttttccacaattgcgtgaagttggtgcccgcatgctcttgcaggtccacgatgaactcttgttagaagcgccaaaagagcgtgcggaagaggtggcagccctcgcgaaagaagttatggaaggcgtgtggcccttagcggtgcctcttgaagtcgaagttggtattggcgaggattggctggctgccaaagga

SEQ ID NO: 6176 - protein, 841 aa, synthetic construct
  REGION 1..841: note = Variant of DNA polymerase I from Thermus sp. strain 2.9
MHHHHHHGGSGVLPVFEPKGRVLLVDGHHLAYRNFFALKGLTTSLGEPVQGVYGFAKSLLKALKEDGDVVIVVFDAKAPSFRHEAYEAYKAGRAPTPEDFPRQLALMKELVDLLGLERLEVPGFEADDVLATLAKKAEREGYEVQILTADRDLFQLLSPRISVLHPEGHRITPEWLWEKYGLRPEQWVDFRALAGDPSDNIPGVKGIGEKTALKLLKEWGSLENLLKNLDQVKPESVREKILAHLEDLKLSRELSRVRTDLPLEVDFGRRREPDWEGLKAFLERLEFGSLLHEFGLLESPLLAEEAPWPPPEGAFLGYRLSRPEPMWAELLALAASAQGRVYRAEDPHGALRGLFEVRTLLAKDLAVVALREGLDLPPTDDPMLLAYLLDPSNTTPEGVARRYGGEWWEDAAKRALLAERLHENLLGRLQGEERLLWLYEEVEKPLSRVLAHMEATGVKLDVAYLENLSLEVAAHMRRLEEEVFRLAGRSFRLNSRDQLERVLFDELGLPPIGKTEKTGKRSTSAAVLEALREVHPIVDKILQYREMAKLKGTYIDRLPALVHPKTGRLHTRFNQTATATGRLSSSDPNLQNIPVRTPLGQKIRRAFVAEEGWRLVALDYRQIELRVLAHLSGDENLIRVFQEGKDIHTQTASWMFGLSAEAIDPLMRRAAKTINFGVLYGMSAFRLSQELGIPLEEAQGFIQKYFQSYPKVKAWIEKTLREGRTRGYVETLFGRRRYVPDLNGRVKGKREAAERMAFNMPVQGTAADLMKLAMVRLFPQLREVGARMLLQVHDELLLEAPKERAEEVAALAKEVMEGVWPLAVPLEVEVGIGEDWLAAKG

SEQ ID NO: 6177 - DNA, 2523 bp, synthetic construct
  misc_feature 1..2523: note = Variant of DNA polymerase I from Thermus sp. strain 2.9
  source 1..2523: mol_type = other DNA
atgcaccatcatcatcatcatggcggtagcggcgtgttaccggtgttcgagcctaaaggtcgcgtgcttctggttgatggccatcatctcgcgtatcgtaacttctttgccctgaaaggattaaccaccagcctgggcgagccggtacagggtgtctacggctttgcaaagtcgctcctgaaagctctgaaagaagacggtgatgtggtgattgttgtctttgatgcgaaagcgccaagttttcgccacgaagcgtacgaagcttacaaagccgggcgtgctccaacgccggaagactttcctcgccaattggcgcttatgaaggaattagtggatttgcttggcctcgaacgcttggaagttcccggtttcgaggcagacgacgtattagcgactctcgcaaagaaagccgaacgtgagggctatgaagtccagatcttgacagcagatcgcgatcttttccagcttttatctccgcgcatctcggtgttacacccggaagggcatcgtatcaccccggaatggctctgggagaaatatggtttgcgtcccgaacaatgggtggattttcgcgccttagcaggcgatccgagcgacaatattccgggagttaaaggtatcggcgagaagacggcgctcaagctccttaaagaatgggggtcgttggagaacttgcttaagaatttagatcaggtcaaaccagagtcagtgcgtgagaagattcttgctcacctcgaagacctcaaattaagccgcgaattgtcccgtgtacgcaccgatttgccgctcgaagttgatttcggccgccgccgcgaacctgactgggagggtcttaaagcgtttttagagcgtcttgaatttggttcgctcttgcatgaattcggccttttagaaagcccgttaccggccgaagaagcaccttggccaccgcccgagggcgcgtttttaggttaccgtttgagtcgcccggaaccgatgtgggccgaattactggctcttgcagcgtctgcccagggacgtgtgtatcgcgcggaagaccctcatggtgcgctccgcggcctcttcgaagtccgtggactccttgccaaagacttagctgttgttgcattgcgcgaaggtcttgatttacctccgactgatgatccaatgcttcttgcgtacctcttggacccgtcaaacacgacgcccgaaggcgtagcccgtcgttacggcggcgagtggaccgaagatgcagcgaaacgcgcgttattggccgaacgtttgcacgaaaatttattaggacgtttgcaaggcgaggaacgtctcctctggctttacgaagaagtggagaaaccattgagtcgcgtgctcgcgcatatggaagctaccggtgtcaaattagacgtggcgtatttggagaatcttcaccttgaagttgctgcccacatgcgccgcttggaggaagaagtattccgtttagcaggccactcctttcgccttaactctcgcgatcagttagaacgtgtgttgttcgatgaacttggtctccctcctatcggcaagacagagaagaccggtaaacgtagcacttcagcggcggttttagaagctcttcgcgaagtccatcccattgtggacaagatcttgcagtaccgcgaaatggcgaaattgaaaggcacctatattgaccgtcttccggcattagtccacccgaaaacgggacgcctccatacccgcttcaaccaaacagccacggcgaccggtcgtttgtcctcctctgatccaaaccttcagaatattccagtacgtaccccattgggccagaagatccgccgtgcgtttgtagctgaggagggttggcgtttagtggccctcgattatagtcaaattgaattacgtgtccttgcccatctttctggcgatgagaacctcatccgcgtgtttcaggaaggcaaagacattcacactcaaacggcaagctggatgtttggattatcagctgaagcgatcgatcctttgatgcgtcgtgcagcgaagaccatcaatttcggtgttctctacggtatgagtgcctttcgtttgtcgcaggaattaggcattccctatgaagaagctcaggcgttcattcagaaatactttcaaagctatcccaaagttaaagcatggatcgagaagactctcgaggaaggccgcacacgtggttacgtagagaccttatttggacgtcgccgctatgttcccgatttaaacgctcgcgtgaaaagcaaacgtgaagccgccgaacgcatggcgttcaacatgcctgtacagggcacggcagctgacctcatgaaacttgcaatggtgcgcctttttccacaattgcgtgaagttggtgcccgcatgctcttgcaggtccacgatgaactcttgttagaagcgccaaaagagcgtgcggaagaggtggcagccctcgcgaaagaagttatggaaggcgtgtggcccttagcggtgcctcttgaagtcgaagttggtattggcgaggattggctggctgccaaagga

SEQ ID NO: 6178 - protein, 841 aa, synthetic construct
  REGION 1..841: note = Variant of DNA polymerase I from Thermus sp. strain 2.9
MHHHHHHGGSGVLPVFEPKGRVLLVDGHHLAYRNFFALKGLTTSLGEPVQGVYGFAKSLLKALKEDGDVVIVVFDAKAPSFRHEAYEAYKAGRAPTPEDFPRQLALMKELVDLLGLERLEVPGFEADDVLATLAKKAEREGYEVQILTADRDLFQLLSPRISVLHPEGHRITPEWLWEKYGLRPEQWVDFRALAGDPSDNIPGVKGIGEKTALKLLKEWGSLENLLKNLDQVKPESVREKILAHLEDLKLSRELSRVRTDLPLEVDFGRRREPDWEGLKAFLERLEFGSLLHEFGLLESPLPAEEAPWPPPEGAFLGYRLSRPEPMWAELLALAASAQGRVYRAEDPHGALRGLFEVRGLLAKDLAVVALREGLDLPPTDDPMLLAYLLDPSNTTPEGVARRYGGEWTEDAAKRALLAERLHENLLGRLQGEERLLWLYEEVEKPLSRVLAHMEATGVKLDVAYLENLHLEVAAHMRRLEEEVFRLAGHSFRLNSRDQLERVLFDELGLPPIGKTEKTGKRSTSAAVLEALREVHPIVDKILQYREMAKLKGTYIDRLPALVHPKTGRLHTRFNQTATATGRLSSSDPNLQNIPVRTPLGQKIRRAFVAEEGWRLVALDYSQIELRVLAHLSGDENLIRVFQEGKDIHTQTASWMFGLSAEAIDPLMRRAAKTINFGVLYGMSAFRLSQELGIPYEEAQAFIQKYFQSYPKVKAWIEKTLEEGRTRGYVETLFGRRRYVPDLNARVKSKREAAERMAFNMPVQGTAADLMKLAMVRLFPQLREVGARMLLQVHDELLLEAPKERAEEVAALAKEVMEGVWPLAVPLEVEVGIGEDWLAAKG

SEQ ID NO: 6179 - DNA, 2523 bp, synthetic construct
  misc_feature 1..2523: note = Variant of DNA polymerase I from Thermus sp. strain 2.9
  source 1..2523: mol_type = other DNA
atgcaccatcatcatcatcatggcggtagcggcgtgttaccggtgttcgagcctaaaggtcgcgtgcttctggttgatggccatcatctcgcgtatcgtaacttctttgccctgaaaggattaaccaccagcctgggcgagccggtacagggtgtctacggctttgcaaagtcgctcctgaaagctctgaaagaagacggtgatgtggtgattgttgtctttgatgcgaaagcgccaagttttcgccacgaagcgtacgaagcttacaaagccgggcgtgctccaacgccggaagactttcctcgccaattggcgcttatgaaggaattagtggatttgcttggcctcgaacgcttggaagttcccggtttcgaggcagacgacgtattagcgactctcgcaaagaaagccgaacgtgagggctatgaagtccagatcttgacagcagatcgcgatcttttccagcttttatctccgcgcatctcggtgttacacccggaagggcatcgtatcaccccggaatggctctgggagaaatatggtttgcgtcccgaacaatgggtggattttcgcgccttagcaggcgatccgagcgacaatattccgggagttaaaggtatcggcgagaagacggcgctcaagctccttaaagaatgggggtcgttggagaacttgcttaagaatttagatcaggtcaaaccagagtcagtgcgtgagaagattcttgctcacctcgaagacctcaaattaagccgcgaattgtcccgtgtacgcaccgatttgccgctcgaagttgatttcggtcgccgccgcgaacctgactgggagggtcttaaagcgtttttagagcgtcttgaatttggttcgctcttgcatgaattcggccttttagaaagcccgttactggccgaagaagttccttggccaccgcccgagggcgcgtttttaggttaccgtttgagtcgcccggaaccgatgtgggccgaattactggctcttgcagcgtctgcccagggacgtgtgtatcgcgcggaagaccctcatggtgcgctccgcggcctcttcgaagtccgtggactccttgccaaagacttagctgttgttgcattgcgcgaaggtcttgatttacctccgactgatgatccaatgcttcttgcgtacctcttggacccgtcaaacacgacgcccgaaggcgtagcccgtcgttacggcggcgagtggaccgaagatgcagcgaaacgcgcgttattggccgaacgtttgcacgaaaatttattaggacgtttgcaaggcgaggaacgtctcctctggctttacgaagaagtggagaaaccattgagtcgcgtgctcgcgcatatggaagctaccggtgtcaaattagacgtggcgtatttggagaatctcagccttgaagttgctgcccacatgcgccgcttggaggaagaagtattccgtttagcaggccgttcctttcgccttaactctcgcgatcagttagaacgtgtgttgttcgatgaacttggtctccctcctatcggcaagacagagaagaccggtaaacgtagcacttcagcggcggttttagaagctcttcgcgaagtccatcccattgtggacaagatcttgcagtaccgcgaaatggcgaaattgaaaggcacctatattgaccgtcttccggcattagtccacccgaaaacgggacgcctccatacccgcttcaaccaaacagccacggcgaccggtcgtttgtcctcctctgatccaaaccttcagaatattccagtacgtaccccattgggccagaagatccgccgtgcgtttgtagctgaggagggttggcgtttagtggccctcgattatcgtcaaattgaattacgtgtccttgcccatctttctggcgatgagaacctcatccgcgtgtttcaggaaggcaaagacattcacactcaaacggcaagctggatgtttggattatcagctgaagcgatcgatcctttgatgcgtcgtgcagcgaagaccatcaatttcggtgttctctacggtatgagtgcctttcgtttgtcgcaggaattaggcattccctatgaagaagctcaggcgttcattcagaaatactttcaaagctatcccaaagttaaagcatggatcgagaagactctccgtgaaggccgcacacgtggttacgtagagaccttatttggacgtcgccgctatgttcccgatttaaacgctcgcgtgaaaggcaagcgtgaagccgccgaacgcatggcgttcaacatgcctgtacagggcacggcagctgacctcatgaaacttgcaatggtgcgcctttttccacaattgcgtgaagttggtgcccgcatgctcttgcaggtccacgatgaactcttgttagaagcgccaaaagagcgtgcggaagaggtggcagccctcgcgaaagaagttatggaaggcgtgtggcccttagcggtgcctcttgaagtcgaagttggtattggcgaggattggctggctgccaaagga

SEQ ID NO: 6180 - protein, 841 aa, synthetic construct
  REGION 1..841: note = Variant of DNA polymerase I from Thermus sp. strain 2.9
MHHHHHHGGSGVLPVFEPKGRVLLVDGHHLAYRNFFALKGLTTSLGEPVQGVYGFAKSLLKALKEDGDVVIVVFDAKAPSFRHEAYEAYKAGRAPTPEDFPRQLALMKELVDLLGLERLEVPGFEADDVLATLAKKAEREGYEVQILTADRDLFQLLSPRISVLHPEGHRITPEWLWEKYGLRPEQWVDFRALAGDPSDNIPGVKGIGEKTALKLLKEWGSLENLLKNLDQVKPESVREKILAHLEDLKLSRELSRVRTDLPLEVDFGRRREPDWEGLKAFLERLEFGSLLHEFGLLESPLLAEEVPWPPPEGAFLGYRLSRPEPMWAELLALAASAQGRVYRAEDPHGALRGLFEVRGLLAKDLAVVALREGLDLPPTDDPMLLAYLLDPSNTTPEGVARRYGGEWTEDAAKRALLAERLHENLLGRLQGEERLLWLYEEVEKPLSRVLAHMEATGVKLDVAYLENLSLEVAAHMRRLEEEVFRLAGRSFRLNSRDQLERVLFDELGLPPIGKTEKTGKRSTSAAVLEALREVHPIVDKILQYREMAKLKGTYIDRLPALVHPKTGRLHTRFNQTATATGRLSSSDPNLQNIPVRTPLGQKIRRAFVAEEGWRLVALDYRQIELRVLAHLSGDENLIRVFQEGKDIHTQTASWMFGLSAEAIDPLMRRAAKTINFGVLYGMSAFRLSQELGIPYEEAQAFIQKYFQSYPKVKAWIEKTLREGRTRGYVETLFGRRRYVPDLNARVKGKREAAERMAFNMPVQGTAADLMKLAMVRLFPQLREVGARMLLQVHDELLLEAPKERAEEVAALAKEVMEGVWPLAVPLEVEVGIGEDWLAAKG

SEQ ID NO: 6181 - DNA, 2523 bp, synthetic construct
  misc_feature 1..2523: note = Variant of DNA polymerase I from Thermus sp. strain 2.9
  source 1..2523: mol_type = other DNA
atgcaccatcatcatcatcatggcggtagcggcgtgttaccggtgttcgagcctaaaggtcgcgtgcttctggttgatggccatcatctcgcgtatcgtaacttctttgccctgaaaggattaaccaccagcctgggcgagccggtacagggtgtctacggctttgcaaagtcgctcctgaaagctctgaaagaagacggtgatgtggtgattgttgtctttgatgcgaaagcgccaagttttcgccacgaagcgtacgaagcttacaaagccgggcgtgctccaacgccggaagactttcctcgccaattggcgcttatgaaggaattagtggatttgcttggcctcgaacgcttggaagttcccggtttcgaggcagacgacgtattagcgactctcgcaaagaaagccgaacgtgagggctatgaagtccagatcttgacagcagatcgcgatcttttccagcttttatctccgcgcatctcggtgttacacccggaagggcatcgtatcaccccggaatggctctgggagaaatatggtttgcgtcccgaacaatgggtggattttcgcgccttagcaggcgatccgagcgacaatattccgggagttaaaggtatcggcgagaagacggcgctcaagctccttaaagaatgggggtcgttggagaacttgcttaagaatttagatcaggtcaaaccagagtcagtgcgtgagaagattcttgctcacctcgaagacctcaaattaagccgcgaattgtcccgtgtacgcaccgatttgccgctcgaagttgatttcggtcgccgccgcgaacctgactgggagggtcttaaagcgtttttagagcgtcttgaatttggttcgctcttgcatgaattcggccttttagaaagcccgttactggccgaagaagcaccttggccaccgcccgagggcgcgtttttaggttaccgtttgagtcgcccggaaccgatgtgggccgaattactggctcttgcagcgtctgcccagggacgtgtgtatcgcgcggaagaccctcatggtgcgctccgcggcctcttcgaagtccgtggactccttgccaaagacttagctgttgttgcattgcgcgaaggtcttgatttacctccgactgatgatccaatgcttcttgcgtacctcttggacccgtcaaacacgacgcccgaaggcgtagcccgtcgttacggcggcgagtggaccggtgatgcagcgaaacgcgcgttattggccgaacgtttgcacgaaaatttattaggacgtttgcaaggcgaggaacgtctcctctggctttacgaagaagtggagaaaccattgagtcgcgtgctcgcgcatatggaagctaccggtgtcaaattagacgtggcgtatttggagaatctcagccttgaagttgctgcccacatgcgccgcttggaggaagaagtattccgtttagcaggccgttcctttcgccttaactctcgcgatcagttagaacgtgtgttgttcgatgaacttggtctccctcctatcggcaagacagagaagaccggtaaacgtagcacttcagcggcggttttagaagctcttcgcgaagtccatcccattgtggacaagatcttgcagtaccgcgaaatggcgaaattgaaaggcacctatattgaccgtcttccggcattagtccacccgaaaacgggacgcctccatacccgcttcaaccaaacagccacggcgaccggtcgtttgtcctcctctgatccaaaccttcagaatattccagtacgtaccccattgggccagaagatccgccgtgcgtttgtagctgaggagggttggcgtttagtggccctcgattatcgtcaaattgaattacgtgtccttgcccatctttctggcgatgagaacctcatccgcgtgtttcaggaaggcaaagacattcacactcaaacggcaagctggatgtttggattatcagctgaagcgatcgatcctttgatgcgtcgtgcagcgaagaccatcaatttcggtgttctctacggtatgagtgcctttcgtttgtcgcaggaattaggcattccctatgaagaagctcaggcgttcattcagaaatactttcaaagctatcccaaagttaaagcatggatcgagaagactctccgtgaaggccgcacacgtggttacgtagagaccttatttggacgtcgccgctatgttcccgatttaaacgctcgcgtgaaaggcaagcgtgaagccgccgaacgcatggcgttcaacatgcctgtacagggcacggcagctgacctcatgaaacttgcaatggtgcgcctttttccacaattgcgtgaagttggtgcccgcatgctcttgcaggtccacgatgaactcttgttagaagcgccaaaagagcgtgcggaagaggtggcagccctcgcgaaagaagttatggaaggcgtgtggcccttagcggtgcctcttgaagtcgaagttggtattggcgaggattggctggctgccaaagga

SEQ ID NO: 6182 - protein, 841 aa, synthetic construct
  REGION 1..841: note = Variant of DNA polymerase I from Thermus sp. strain 2.9
MHHHHHHGGSGVLPVFEPKGRVLLVDGHHLAYRNFFALKGLTTSLGEPVQGVYGFAKSLLKALKEDGDVVIVVFDAKAPSFRHEAYEAYKAGRAPTPEDFPRQLALMKELVDLLGLERLEVPGFEADDVLATLAKKAEREGYEVQILTADRDLFQLLSPRISVLHPEGHRITPEWLWEKYGLRPEQWVDFRALAGDPSDNIPGVKGIGEKTALKLLKEWGSLENLLKNLDQVKPESVREKILAHLEDLKLSRELSRVRTDLPLEVDFGRRREPDWEGLKAFLERLEFGSLLHEFGLLESPLLAEEAPWPPPEGAFLGYRLSRPEPMWAELLALAASAQGRVYRAEDPHGALRGLFEVRGLLAKDLAVVALREGLDLPPTDDPMLLAYLLDPSNTTPEGVARRYGGEWTGDAAKRALLAERLHENLLGRLQGEERLLWLYEEVEKPLSRVLAHMEATGVKLDVAYLENLSLEVAAHMRRLEEEVFRLAGRSFRLNSRDQLERVLFDELGLPPIGKTEKTGKRSTSAAVLEALREVHPIVDKILQYREMAKLKGTYIDRLPALVHPKTGRLHTRFNQTATATGRLSSSDPNLQNIPVRTPLGQKIRRAFVAEEGWRLVALDYRQIELRVLAHLSGDENLIRVFQEGKDIHTQTASWMFGLSAEAIDPLMRRAAKTINFGVLYGMSAFRLSQELGIPYEEAQAFIQKYFQSYPKVKAWIEKTLREGRTRGYVETLFGRRRYVPDLNARVKGKREAAERMAFNMPVQGTAADLMKLAMVRLFPQLREVGARMLLQVHDELLLEAPKERAEEVAALAKEVMEGVWPLAVPLEVEVGIGEDWLAAKG

SEQ ID NO: 6183 - DNA, 2523 bp, synthetic construct
  misc_feature 1..2523: note = Variant of DNA polymerase I from Thermus sp. strain 2.9
  source 1..2523: mol_type = other DNA
atgcaccatcatcatcatcatggcggtagcggcgtgttaccggtgttcgagcctaaaggtcgcgtgcttctggttgatggccatcatctcgcgtatcgtaacttctttgccctgaaaggattaaccaccagcctgggcgagccggtacagggtgtctacggctttgcaaagtcgctcctgaaagctctgaaagaagacggtgatgtggtgattgttgtctttgatgcgaaagcgccaagttttcgccacgaagcgtacgaagcttacaaagccgggcgtgctccaacgccggaagactttcctcgccaattggcgcttatgaaggaattagtggatttgcttggcctcgaacgcttggaagttcccggtttcgaggcagacgacgtattagcgactctcgcaaagaaagccgaacgtgagggctatgaagtccagatcttgacagcagatcgcgatcttttccagcttttatctccgcgcatctcggtgttacacccggaagggcatcgtatcaccccggaatggctctgggagaaatatggtttgcgtcccgaacaatgggtggattttcgcgccttagcaggcgatccgagcgacaatattccgggagttaaaggtatcggcgagaagacggcgctcaagctccttaaagaatgggggtcgttggagaacttgcttaagaatttagatcaggtcaaaccagagtcagtgcgtgagaagattcttgctcacctcgaagacctcaaattaagccgcgaattgtcccgtgtacgcaccgatttgccgctcgaagttgatttcggtcgccgccgcgaacctgactgggagggtcttaaagcgtttttagagcgtcttgaatttggttcgctcttgcatgaattcggccttttagaaagcccgttactggccgaagaagcaccttggccaccgcccgagggcgcgtttttaggttaccgtttgagtcgcccggaaccgatgtgggccgaattactggctcttgcagcgtctgcccagggacgtgtgtatcgcgcggaagaccctcatggtgcgctccgcggcctcttcgaagtccgtggactccttgccaaagacttagctgttgttgcattgcgcgaaggtcttgatttacctccgactgatgatccaatgcttcttgcgtacctcttggacccgtcaaacacgacgcccgaaggcgtagcccgtcgttacggcggcgagtggaccgaagatgcagcgaaacgcgcgttattggccgaacgtttgcacgaaaatttattaggacgtttgcaaggcgaggaacgtctcctctggctttacgaagaagtggagaaaccattgagtcgcgtgctcgcgcatatggaagctaccggtgtcaaattagacgtggcgtatttggagaatctcagccttgaagttgctgcccacatgcgccgcttggaggaagaagtattccgtttagcaggccgttcctttcgccttaactctcgcgatcagttagaacgtgtgttgttcgatgaacttggtctccctcctatcggcaagacagagaagaccggtaaacgtagcacttcagcggcggttttagaagctcttcgcgaagtccatcccattgtggacaagatcttgcagtaccgcgaaatggcgaaattgaaaggcacctatattgaccgtcttccggcattagtccacccgaaaacgggacgcctccatacccgcttcaaccaaacagccacggcgaccggtcgtttgtcctcctctgatccaaaccttcagaatattccagtacgtaccccattgggccagaagatccgccgtgcgtttgtagctgaggagggttggcgtttagtggggctcgattatcgtcaaattgaattacgtgtccttgcccatctttctggcgatgagaacctcatccgcgtgtttcaggaaggcaaagacattcacactcaaacggcaagctggatgtttggattatcagctgaagcgatcgatcctttgatgcgtcgtgcagcgaagaccatcaatttcggtgttctctacggtatgagtgcctttcgtttgtcgcaggaattaggcattccctatgaagaagctcaggcgttcattcagaaatactttcaaagctatcccaaagttaaagcatggatcgagaagactctccgtgaaggccgcacacgtggttacgtagagaccttatttggacgtcgccgctatgttcccgatttaaacgctcgcgtgaaaggcaagcgtgaagccgccgaacgcatggcgttcaacatgcctgtacagggcacggcagctgacctcatgaaacttgcaatggtgcgcctttttccacaattgcgtgaagttggtgcccgcatgctcttgcaggtccacgatgaactcttgttagaagcgccaaaagagcgtgcggaagaggtggcagccctcgcgaaagaagttatggaaggcgtgtggcccttagcggtgcctcttgaagtcgaagttggtattggcgaggattggctggctgccaaagga

SEQ ID NO: 6184 - protein, 841 aa, synthetic construct
  REGION 1..841: note = Variant of DNA polymerase I from Thermus sp. strain 2.9
MHHHHHHGGSGVLPVFEPKGRVLLVDGHHLAYRNFFALKGLTTSLGEPVQGVYGFAKSLLKALKEDGDVVIVVFDAKAPSFRHEAYEAYKAGRAPTPEDFPRQLALMKELVDLLGLERLEVPGFEADDVLATLAKKAEREGYEVQILTADRDLFQLLSPRISVLHPEGHRITPEWLWEKYGLRPEQWVDFRALAGDPSDNIPGVKGIGEKTALKLLKEWGSLENLLKNLDQVKPESVREKILAHLEDLKLSRELSRVRTDLPLEVDFGRRREPDWEGLKAFLERLEFGSLLHEFGLLESPLLAEEAPWPPPEGAFLGYRLSRPEPMWAELLALAASAQGRVYRAEDPHGALRGLFEVRGLLAKDLAVVALREGLDLPPTDDPMLLAYLLDPSNTTPEGVARRYGGEWTEDAAKRALLAERLHENLLGRLQGEERLLWLYEEVEKPLSRVLAHMEATGVKLDVAYLENLSLEVAAHMRRLEEEVFRLAGRSFRLNSRDQLERVLFDELGLPPIGKTEKTGKRSTSAAVLEALREVHPIVDKILQYREMAKLKGTYIDRLPALVHPKTGRLHTRFNQTATATGRLSSSDPNLQNIPVRTPLGQKIRRAFVAEEGWRLVGLDYRQIELRVLAHLSGDENLIRVFQEGKDIHTQTASWMFGLSAEAIDPLMRRAAKTINFGVLYGMSAFRLSQELGIPYEEAQAFIQKYFQSYPKVKAWIEKTLREGRTRGYVETLFGRRRYVPDLNARVKGKREAAERMAFNMPVQGTAADLMKLAMVRLFPQLREVGARMLLQVHDELLLEAPKERAEEVAALAKEVMEGVWPLAVPLEVEVGIGEDWLAAKG

SEQ ID NO: 6185 - DNA, 2523 bp, synthetic construct
  misc_feature 1..2523: note = Variant of DNA polymerase I from Thermus sp. strain 2.9
  source 1..2523: mol_type = other DNA
atgcaccatcatcatcatcatggcggtagcggcgtgttaccggtgttcgagcctaaaggtcgcgtgcttctggttgatggccatcatctcgcgtatcgtaacttctttgccctgaaaggattaaccaccagcctgggcgagccggtacagggtgtctacggctttgcaaagtcgctcctgaaagctctgaaagaagacggtgatgtggtgattgttgtctttgatgcgaaagcgccaagttttcgccacgaagcgtacgaagcttacaaagccgggcgtgctccaacgccggaagactttcctcgccaattggcgcttatgaaggaattagtggatttgcttggcctcgaacgcttggaagttcccggtttcgaggcagacgacgtattagcgactctcgcaaagaaagccgaacgtgagggctatgaagtccagatcttgacagcagatcgcgatcttttccagcttttatctccgcgcatctcggtgttacacccggaagggcatcgtatcaccccggaatggctctgggagaaatatggtttgcgtcccgaacaatgggtggattttcgcgccttagcaggcgatccgagcgacaatattccgggagttaaaggtatcggcgagaagacggcgctcaagctccttaaagaatgggggtcgttggagaacttgcttaagaatttagatcaggtcaaaccagagtcagtgcgtgagaagattcttgctcacctcgaagacctcaaattaagccgcgaattgtcccgtgtacgcaccgatttgccgctcgaagttgatttcggtcgccgccgcgaacctgactgggagggtcttaaagcgtttttagagcgtcttgaatttggttcgctcttgcatgaattcggccttttagaaagcccgttactggccgaagaagcaccttggccaccgcccgagggcgcgtttttaggttaccgtttgagtcgcccggaaccgatgtgggccgaattactggctcttgcagcgtctgcccagggacgtgtgtatcgcgcggaagaccctcatggtgcgctccgcggcctcttcgaagtccgtggcctccttgccaaagacttagctgttgttgcattgcgcgaaggtcttgatttacctccgactgatgatccaatgcttcttgcgtacctcttggacccgtcaaacacgacgcccgaaggcgtagcccgtcgttacggcggcgagtggtgggaagatgcaggcaaacgcgcgttattggccgaacgtttgcacgaaaatttattaggacgtttgcaaggcgaggagcgtctcctgtggctttacgaagaagtggagaaaccattgagtcgcgtgctcgcgcatatggaagctaccggtgtcaaattagacgtggcgtatttggagaatctcctgcttgaagttgctgcccaaatgcgccgcttggaggaagaagtattccgtttagcaggccgttcctttcgccttaactctcgcgatcagttagaacgtgtgttgttcgatgaacttggtctccctcctatcggcaagacagagaagaccggtaaacgtagcacttcagcggcggttttagaagctcttcgcgaagtccatcccattgtggacaagatcttgcagtaccgcgaaatggcgaaattgaaaggcacctatattgaccgtcttccggcattagtccacccgaaaacgggacgcctccatacccgcttcaaccaaacagccacggcgaccggtcgtttgtcctcctctgatccaaaccttcagaatattccagtacgtaccccattgggccagaagatccgccgtgcgtttgtagctgagccgggttggcgtttagtggccctcgattatcgtcaaattgaattacgtgtccttgcccatctttctggcgatgagaacctcatccgcgtgtttcaggaaggcaaagacattcacactcaaacggcaagctggatgtttggattatcagctgaagcgatcgatcctttgatgcgtcgtgcagcgaagaccatcaatttcggtgttctctacggtatgagtgcctttcgtttgtcgcaggaattaggcattcccctggaagaagctcaggctttcattcagaaatactttcaaggctatcccaaagttaaagcatggatcgagaagactctccgtgaaggccgcacacgtggttacgtagagaccttatttggacgtcgccgctatgttcccgatttaaactcgcgcgtgaaaggcaagcgtgaagccgccgaacgcatggcgttcaacatgcctgtacagggcacggcagctgacctcatgaaacttgcaatggtgcgcctttttccacaattgcgtgaagttggtgcccgcatgctcttgcaggtccacgatgaactcttgttagaagcgccaaaagagcgtgcggaagaggtggcagccctcgcgaaagaagttatggaaggcgtgtggcccttagcggtgcctcttgaagtcgaagttggtattggcgaggattggctggctgccaaagga

SEQ ID NO: 6186 - protein, 841 aa, synthetic construct
  REGION 1..841: note = Variant of DNA polymerase I from Thermus sp. strain 2.9
MHHHHHHGGSGVLPVFEPKGRVLLVDGHHLAYRNFFALKGLTTSLGEPVQGVYGFAKSLLKALKEDGDVVIVVFDAKAPSFRHEAYEAYKAGRAPTPEDFPRQLALMKELVDLLGLERLEVPGFEADDVLATLAKKAEREGYEVQILTADRDLFQLLSPRISVLHPEGHRITPEWLWEKYGLRPEQWVDFRALAGDPSDNIPGVKGIGEKTALKLLKEWGSLENLLKNLDQVKPESVREKILAHLEDLKLSRELSRVRTDLPLEVDFGRRREPDWEGLKAFLERLEFGSLLHEFGLLESPLLAEEAPWPPPEGAFLGYRLSRPEPMWAELLALAASAQGRVYRAEDPHGALRGLFEVRGLLAKDLAVVALREGLDLPPTDDPMLLAYLLDPSNTTPEGVARRYGGEWWEDAGKRALLAERLHENLLGRLQGEERLLWLYEEVEKPLSRVLAHMEATGVKLDVAYLENLLLEVAAQMRRLEEEVFRLAGRSFRLNSRDQLERVLFDELGLPPIGKTEKTGKRSTSAAVLEALREVHPIVDKILQYREMAKLKGTYIDRLPALVHPKTGRLHTRFNQTATATGRLSSSDPNLQNIPVRTPLGQKIRRAFVAEPGWRLVALDYRQIELRVLAHLSGDENLIRVFQEGKDIHTQTASWMFGLSAEAIDPLMRRAAKTINFGVLYGMSAFRLSQELGIPLEEAQAFIQKYFQGYPKVKAWIEKTLREGRTRGYVETLFGRRRYVPDLNSRVKGKREAAERMAFNMPVQGTAADLMKLAMVRLFPQLREVGARMLLQVHDELLLEAPKERAEEVAALAKEVMEGVWPLAVPLEVEVGIGEDWLAAKG

SEQ ID NO: 6187 - DNA, 2523 bp, synthetic construct
  misc_feature 1..2523: note = Variant of DNA polymerase I from Thermus sp. strain 2.9
  source 1..2523: mol_type = other DNA
atgcaccatcatcatcatcatggcggtagcggcgtgttaccggtgttcgagcctaaaggtcgcgtgcttctggttgatggccatcatctcgcgtatcgtaacttctttgccctgaaaggattaaccaccagcctgggcgagccggtacagggtgtctacggctttgcaaagtcgctcctgaaagctctgaaagaagacggtgatgtggtgattgttgtctttgatgcgaaagcgccaagttttcgccacgaagcgtacgaagcttacaaagccgggcgtgctccaacgccggaagactttcctcgccaattggcgcttatgaaggaattagtggatttgcttggcctcgaacgcttggaagttcccggtttcgaggcagacgacgtattagcgactctcgcaaagaaagccgaacgtgagggctatgaagtccagatcttgacagcagatcgcgatcttttccagcttttatctccgcgcatctcggtgttacacccggaagggcatcgtatcaccccggaatggctctgggagaaatatggtttgcgtcccgaacaatgggtggattttcgcgccttagcaggcgatccgagcgacaatattccgggagttaaaggtatcggcgagaagacggcgctcaagctccttaaagaatgggggtcgttggagaacttgcttaagaatttagatcaggtcaaaccagagtcagtgcgtgagaagattcttgctcacctcgaagacctcaaattaagccgcgaattgtcccgtgtacgcaccgatttgccgctcgaagttgatttcggtcgccgccgcgaacctgactgggagggtcttaaagcgtttttagagcgtcttgaatttggttcgctcttgcatgaattcggccttttagaaagcccgttactggccgaagaagcaccttggccaccgcccgagggcgcgtttttaggttaccgtttgagtcgcccggaaccgatgtgggccgaattactggctcttgcagcgtctgcccagggacgtgtgtatcgcgcggaagaccctcatggtgcgctccgcggcctcttcgaagtccgtggactccttgccaaagacttagctgttgttgcattgcgcgaaggtcttgatttacctccgactgatgatccaatgcttcttgcgtacctcttggacccgtcaaacacgacgcccgaaggcgtagcccgtcgttacggcggcgagtggaccgaagatgcagcgaaacgcgcgttattggccgaacgtttgcacgaaaatttattaggacgtttgcaaggcgaggaacgtctcctctggctttacgaagaagtggagaaaccattgagtcgcgtgctcgcgcatatggaagctaccggtgtcaaattagacgtggcgtatttggagaatctcagccttgaagttgctgcccacatgcgccgcttggaggaagaagtattccgtttagcaggccgttcctttcgccttaactctcgcgatcagttagaacgtgtgttgttcgatgaacttggtctccctcctatcggcaagacagagaagaccggtaaacgtagcacttcagcggcggttttagaagctcttcgcgaagtccatcccattgtggacaagatcttgcagtaccgcgaaatggcgaaattgaaaggcacctatattgaccgtcttccggcattagtccacccgaaaacgggacgcctccatacccgcttcaaccaaacagccacggcgaccggtcgtttgtcctcctctgatccaaaccttcagaatattccagtacgtaccccattgggccagaagatccgccgtgcgtttgtagctgaggagggttggcgtttagtggccctcgattatcgtcaaattgaattacgtgtccttgcccatctttctggcgatgagaacctcatccgcgtgtttcaggaaggcaaagacattcacactcaaacggcaagctggatgtttggattatcagctgaagcgatcgatcctttgatgcgtcgtgcagcgaagaccatcaatttcggtgttctctacggtatgagtgcctttcgtttgtcgcaggaatcgggcattccctatgaagaagctcaggcgttcattcagaaatactttcaaagctatcccaaagttaaagcatggatcgagaagactctccgtgaaggccgcacacgtggttacgtagagaccttatttggacgtcgccgctatgttcccgatttaaacgctcgcgtgaaaggcaagcgtgaagccgccgaacgcatggcgttcaacatgcctgtacagggcacggcagctgacctcatgaaacttgcaatggtgcgcctttttccacaattgcgtgaagttggtgcccgcatgctcttgcaggtccacgatgaactcttgttagaagcgccaaaagagcgtgcggaagaggtggcagccctcgcgaaagaagttatggaaggcgtgtggcccttagcggtgcctcttgaagtcgaagttggtattggcgaggattggctggctgccaaagga

SEQ ID NO: 6188 - protein, 841 aa, synthetic construct
  REGION 1..841: note = Variant of DNA polymerase I from Thermus sp. strain 2.9
MHHHHHHGGSGVLPVFEPKGRVLLVDGHHLAYRNFFALKGLTTSLGEPVQGVYGFAKSLLKALKEDGDVVIVVFDAKAPSFRHEAYEAYKAGRAPTPEDFPRQLALMKELVDLLGLERLEVPGFEADDVLATLAKKAEREGYEVQILTADRDLFQLLSPRISVLHPEGHRITPEWLWEKYGLRPEQWVDFRALAGDPSDNIPGVKGIGEKTALKLLKEWGSLENLLKNLDQVKPESVREKILAHLEDLKLSRELSRVRTDLPLEVDFGRRREPDWEGLKAFLERLEFGSLLHEFGLLESPLLAEEAPWPPPEGAFLGYRLSRPEPMWAELLALAASAQGRVYRAEDPHGALRGLFEVRGLLAKDLAVVALREGLDLPPTDDPMLLAYLLDPSNTTPEGVARRYGGEWTEDAAKRALLAERLHENLLGRLQGEERLLWLYEEVEKPLSRVLAHMEATGVKLDVAYLENLSLEVAAHMRRLEEEVFRLAGRSFRLNSRDQLERVLFDELGLPPIGKTEKTGKRSTSAAVLEALREVHPIVDKILQYREMAKLKGTYIDRLPALVHPKTGRLHTRFNQTATATGRLSSSDPNLQNIPVRTPLGQKIRRAFVAEEGWRLVALDYRQIELRVLAHLSGDENLIRVFQEGKDIHTQTASWMFGLSAEAIDPLMRRAAKTINFGVLYGMSAFRLSQESGIPYEEAQAFIQKYFQSYPKVKAWIEKTLREGRTRGYVETLFGRRRYVPDLNARVKGKREAAERMAFNMPVQGTAADLMKLAMVRLFPQLREVGARMLLQVHDELLLEAPKERAEEVAALAKEVMEGVWPLAVPLEVEVGIGEDWLAAKG

SEQ ID NO: 6189 - DNA, 2523 bp, synthetic construct
  misc_feature 1..2523: note = Variant of DNA polymerase I from Thermus sp. strain 2.9
  source 1..2523: mol_type = other DNA
atgcaccatcatcatcatcatggcggtagcggcgtgttaccggtgttcgagcctaaaggtcgcgtgcttctggttgatggccatcatctcgcgtatcgtaacttctttgccctgaaaggattaaccaccagcctgggcgagccggtacagggtgtctacggctttgcaaagtcgctcctgaaagctctgaaagaagacggtgatgtggtgattgttgtctttgatgcgaaagcgccaagttttcgccacgaagcgtacgaagcttacaaagccgggcgtgctccaacgccggaagactttcctcgccaattggcgcttatgaaggaattagtggatttgcttggcctcgaacgcttggaagttcccggtttcgaggcagacgacgtattagcgactctcgcaaagaaagccgaacgtgagggctatgaagtccagatcttgacagcagatcgcgatcttttccagcttttatctccgcgcatctcggtgttacacccggaagggcatcgtatcaccccggaatggctctgggagaaatatggtttgcgtcccgaacaatgggtggattttcgcgccttagcaggcgatccgagcgacaatattccgggagttaaaggtatcggcgagaagacggcgctcaagctccttaaagaatgggggtcgttggagaacttgcttaagaatttagatcaggtcaaaccagagtcagtgcgtgagaagattcttgctcacctcgaagacctcaaattaagccgcgaattgtcccgtgtacgcaccgatttgccgctcgaagttgatttcggtcgccgccgcgaacctgactgggagggtcttaaagcgtttttagagcgtcttgaatttggttcgctcttgcatgaattcggccttttagaaagcccgttactggccgaagaagcaccttggccaccgcccgagggcgcgtttttaggttaccgtttgagtcgcccggaaccgatgtgggccgaattactggctcttgcagcgtctgcccagggacgtgtgtatcgcgcggaagaccctcatggtgcgctccgcggcctcttcgaagtccgtggactccttgccaaagacttagctgttgttgcattgcgcgaaggtcttgatttacctccgactgatgatccaatgcttcttgcgtacctcttggacccgtcaaacacgacgcccgaaggcgtagcccgtcgttacggcggcgagtggaccgaagatgcagcgaaacgcgcgttattggccgaacgtttgcacgaaaatttattaggacgtttgcaaggcgaggaacgtctcctctggctttacgaagaagtggagaaaccattgagtcgcgtgctcgcgcatatggaagctaccggtgtcaaattagacgtggcgtatttggagaatctcagccttgaagttgctgcccacatgcgccgcttggaggaagaagtattccgtttagcaggccgttcctttcgccttaactctcgcgatcagttagaacgtgtgttgttcgatgaacttggtctccctcctatcggcaagacagagaagaccggtaaacgtagcacttcagcggcggttttagaagctcttcgcgaagtccatcccattgtggacaagatcttgcagtaccgcgaaatggcgaatttgaaaggcacctatattgaccgtcttccggcattagtccacccgaaaacgggacgcctccatacccgcttcaaccaaacagccacggcgaccggtcgtttgtcctcctctgatccaaaccttcagaatattccagtacgtaccccattgggccagaagatccgccgtgcgtttgtagctgaggagggttggcgtttagtggccctcgattatcgtcaaattgaattacgtgtccttgcccatctttctggcgatgagaacctcatccgcgtgtttcaggaaggcaaagacattcacactcaaacggcaagctggatgtttggattatcagctgaagcgatcgatcctttgatgcgtcgtgcagcgaagaccatcaatttcggtgttctctacggtatgagtgcctttcgtttgtcgcaggaattaggcattccctatgaagaagctcaggcgttcattcagaaatactttcaaagctatcccaaagttaaagcatggatcgagaagactctccgtgaaggccgcacacgtggttacgtagagaccttatttggacgtcgccgctatgttcccgatttaaacgctcgcgtgaaaggcaagcgtgaagccgccgaacgcatggcgttcaacatgcctgtacagggcacggcagctgacctcatgaaacttgcaatggtgcgcctttttccacaattgcgtgaagttggtgcccgcatgctcttgcaggtccacgatgaactcttgttagaagcgccaaaagagcgtgcggaagaggtggcagccctcgcgaaagaagttatggaaggcgtgtggcccttagcggtgcctcttgaagtcgaagttggtattggcgaggattggctggctgccaaagga

SEQ ID NO: 6190 - protein, 841 aa, synthetic construct
  REGION 1..841: note = Variant of DNA polymerase I from Thermus sp. strain 2.9
MHHHHHHGGSGVLPVFEPKGRVLLVDGHHLAYRNFFALKGLTTSLGEPVQGVYGFAKSLLKALKEDGDVVIVVFDAKAPSFRHEAYEAYKAGRAPTPEDFPRQLALMKELVDLLGLERLEVPGFEADDVLATLAKKAEREGYEVQILTADRDLFQLLSPRISVLHPEGHRITPEWLWEKYGLRPEQWVDFRALAGDPSDNIPGVKGIGEKTALKLLKEWGSLENLLKNLDQVKPESVREKILAHLEDLKLSRELSRVRTDLPLEVDFGRRREPDWEGLKAFLERLEFGSLLHEFGLLESPLLAEEAPWPPPEGAFLGYRLSRPEPMWAELLALAASAQGRVYRAEDPHGALRGLFEVRGLLAKDLAVVALREGLDLPPTDDPMLLAYLLDPSNTTPEGVARRYGGEWTEDAAKRALLAERLHENLLGRLQGEERLLWLYEEVEKPLSRVLAHMEATGVKLDVAYLENLSLEVAAHMRRLEEEVFRLAGRSFRLNSRDQLERVLFDELGLPPIGKTEKTGKRSTSAAVLEALREVHPIVDKILQYREMANLKGTYIDRLPALVHPKTGRLHTRFNQTATATGRLSSSDPNLQNIPVRTPLGQKIRRAFVAEEGWRLVALDYRQIELRVLAHLSGDENLIRVFQEGKDIHTQTASWMFGLSAEAIDPLMRRAAKTINFGVLYGMSAFRLSQELGIPYEEAQAFIQKYFQSYPKVKAWIEKTLREGRTRGYVETLFGRRRYVPDLNARVKGKREAAERMAFNMPVQGTAADLMKLAMVRLFPQLREVGARMLLQVHDELLLEAPKERAEEVAALAKEVMEGVWPLAVPLEVEVGIGEDWLAAKG

SEQ ID NO: 6191 - DNA, 2523 bp, synthetic construct
  misc_feature 1..2523: note = Variant of DNA polymerase I from Thermus sp. strain 2.9
  source 1..2523: mol_type = other DNA
atgcaccatcatcatcatcatggcggtagcggcgtgttaccggtgttcgagcctaaaggtcgcgtgcttctggttgatggccatcatctcgcgtatcgtaacttctttgccctgaaaggattaaccaccagcctgggcgagccggtacagggtgtctacggctttgcaaagtcgctcctgaaagctctgaaagaagacggtgatgtggtgattgttgtctttgatgcgaaagcgccaagttttcgccacgaagcgtacgaagcttacaaagccgggcgtgctccaacgccggaagactttcctcgccaattggcgcttatgaaggaattagtggatttgcttggcctcgaacgcttggaagttcccggtttcgaggcagacgacgtattagcgactctcgcaaagaaagccgaacgtgagggctatgaagtccagatcttgacagcagatcgcgatcttttccagcttttatctccgcgcatctcggtgttacacccggaagggcatcgtatcaccccggaatggctctgggagaaatatggtttgcgtcccgaacaatgggtggattttcgcgccttagcaggcgatccgagcgacaatattccgggagttaaaggtatcggcgagaagacggcgctcaagctccttaaagaatgggggtcgttggagaacttgcttaagaatttagatcaggtcaaaccagagtcagtgcgtgagaagattcttgctcacctcgaagacctcaaattaagccgcgaattgtcccgtgtacgcaccgatttgccgctcgaagttgatttcggtcgccgccgcgaacctgactgggagggtcttaaagcgtttttagagcgtcttgaatttggttcgctcttgcatgaattcggccttttagaaagcccgttactggccgaagaagcaccttggccaccgcccgagggcgcgtttttaggttaccgtttgagtcgcccggaaccgatgtgggccgaattactggctcttgcagcgtctgcccagggacgtgtgtatcgcgcggaagaccctcatggtgcgctccgcggcctcttcgaagtccgtggactccttgccaaagacttagctgttgttgcattgcgcgaaggtcttgatttacctccgactgatgatccaatgcttcttgcgtacctcttggacccgtcaaacacgacgcccgaaggcgtagcccgtcgttacggcggcgagtggaccgaagatgcagcgaaacgcgcgttattggccgaacgtttgcacgaaaatttattaggacgtttgcaaggcgaggaacgtctcctctggctttacgaagaagtggagaaaccattgagtcgcgtgctcgcgcatatggaagctaccggtgtcaaattagacgtggcgtatttggagaatctcagccttgaagttgctgcccacatgcgccgcttggaggaagaagtattccgtttagcaggccgttcctttcgccttaactctcgcgatcagttagaacgtgtgttgttcgatgaacttggtctccctcctatcggcaagacagagaagaccggtaaacgtagcacttcagcggcggttttagaagctcttcgcgaagtccatcccattgtggacaagatcttgcagtaccgcgaaatggcgaaattgaaaggcacctatattgaccgtcttccggcattagtccacccgaaaacgggacgcctccatacccgcttcaaccaaacagccacggcgaccggtcgtttggcttcctctgatccaaaccttcagaatattccagtacgtaccccattgggccagaagatccgccgtgcgtttgtagctgaggagggttggcgtttagtggccctcgattatcgtcaaattgaattacgtgtccttgcccatctttctggcgatgagaacctcatccgcgtgtttcaggaaggcaaagacattcacactcaaacggcaagctggatgtttggattatcagctgaagcgatcgatcctttgatgcgtcgtgcagcgaagaccatcaatttcggtgttctctacggtatgagtgcctttcgtttgtcgcaggaattaggcattccctatgaagaagctcaggcgttcattcagaaatactttcaaagctatcccaaagttaaagcatggatcgagaagactctccgtgaaggccgcacacgtggttacgtagagaccttatttggacgtcgccgctatgttcccgatttaaacgctcgcgtgaaaggcaagcgtgaagccgccgaacgcatggcgttcaacatgcctgtacagggcacggcagctgacctcatgaaacttgcaatggtgcgcctttttccacaattgcgtgaagttggtgcccgcatgctcttgcaggtccacgatgaactcttgttagaagcgccaaaagagcgtgcggaagaggtggcagccctcgcgaaagaagttatggaaggcgtgtggcccttagcggtgcctcttgaagtcgaagttggtattggcgaggattggctggctgccaaagga

SEQ ID NO: 6192 - protein, 841 aa, synthetic construct
  REGION 1..841: note = Variant of DNA polymerase I from Thermus sp. strain 2.9
MHHHHHHGGSGVLPVFEPKGRVLLVDGHHLAYRNFFALKGLTTSLGEPVQGVYGFAKSLLKALKEDGDVVIVVFDAKAPSFRHEAYEAYKAGRAPTPEDFPRQLALMKELVDLLGLERLEVPGFEADDVLATLAKKAEREGYEVQILTADRDLFQLLSPRISVLHPEGHRITPEWLWEKYGLRPEQWVDFRALAGDPSDNIPGVKGIGEKTALKLLKEWGSLENLLKNLDQVKPESVREKILAHLEDLKLSRELSRVRTDLPLEVDFGRRREPDWEGLKAFLERLEFGSLLHEFGLLESPLLAEEAPWPPPEGAFLGYRLSRPEPMWAELLALAASAQGRVYRAEDPHGALRGLFEVRGLLAKDLAVVALREGLDLPPTDDPMLLAYLLDPSNTTPEGVARRYGGEWTEDAAKRALLAERLHENLLGRLQGEERLLWLYEEVEKPLSRVLAHMEATGVKLDVAYLENLSLEVAAHMRRLEEEVFRLAGRSFRLNSRDQLERVLFDELGLPPIGKTEKTGKRSTSAAVLEALREVHPIVDKILQYREMAKLKGTYIDRLPALVHPKTGRLHTRFNQTATATGRLASSDPNLQNIPVRTPLGQKIRRAFVAEEGWRLVALDYRQIELRVLAHLSGDENLIRVFQEGKDIHTQTASWMFGLSAEAIDPLMRRAAKTINFGVLYGMSAFRLSQELGIPYEEAQAFIQKYFQSYPKVKAWIEKTLREGRTRGYVETLFGRRRYVPDLNARVKGKREAAERMAFNMPVQGTAADLMKLAMVRLFPQLREVGARMLLQVHDELLLEAPKERAEEVAALAKEVMEGVWPLAVPLEVEVGIGEDWLAAKG

SEQ ID NO: 6193 - DNA, 2523 bp, synthetic construct
  misc_feature 1..2523: note = Variant of DNA polymerase I from Thermus sp. strain 2.9
  source 1..2523: mol_type = other DNA
atgcaccatcatcatcatcatggcggtagcggcgtgttaccggtgttcgagcctaaaggtcgcgtgcttctggttgatggccatcatctcgcgtatcgtaacttctttgccctgaaaggattaaccaccagcctgggcgagccggtacagggtgtctacggctttgcaaagtcgctcctgaaagctctgaaagaagacggtgatgtggtgattgttgtctttgatgcgaaagcgccaagttttcgccacgaagcgtacgaagcttacaaagccgggcgtgctccaacgccggaagactttcctcgccaattggcgcttatgaaggaattagtggatttgcttggcctcgaacgcttggaagttcccggtttcgaggcagacgacgtattagcgactctcgcaaagaaagccgaacgtgagggctatgaagtccagatcttgacagcagatcgcgatcttttccagcttttatctccgcgcatctcggtgttacacccggaagggcatcgtatcaccccggaatggctctgggagaaatatggtttgcgtcccgaacaatgggtggattttcgcgccttagcaggcgatccgagcgacaatattccgggagttaaaggtatcggcgagaagacggcgctcaagctccttaaagaatgggggtcgttggagaacttgcttaagaatttagatcaggtcaaaccagagtcagtgcgtgagaagattcttgctcacctcgaagacctcaaattaagccgcgaattgtcccgtgtacgcaccgatttgccgctcgaagttgatttcggtcgccgccgcgaacctgactgggagggtcttaaagcgtttttagagcgtcttgaatttggttcgctcttgcatgaattcggccttttagaaagcccgttactggccgaagaagcaccttggccaccgcccgagggcgcgtttttaggttaccgtttgagtcgcccggaaccgatgtgggccgaattactggctcttgcagcgtctgcccagggacgtgtgtatcgcgcggaagaccctcatggtgcgctccgcggcctcttcgaagtccgtggactccttgccaaagacttagctgttgttgcattgcgcgaaggtcttgatttacctccgactgatgatccaatgcttcttgcgtacctcttggacccgtcaaacacgacgcccgaaggcgtagcccgtcgttacggcggcgagtggaccgaagatgcagcgaaacgcgcgttattggccgaacgtttgcacgaaaatttattaggacgtttgcaaggcgaggaacgtctcctctggctttacgaagaagtggagaaaccattgagtcgcgtgctcgcgcatatggaagctaccggtgtcaaattagacgtggcgtatttggagaatctcagccttgaagttgctgcccacatgcgccgcttggaggaagaagtattccgtttagcaggccgttcctttcgccttaactctcgcgatcagttagaacgtgtgttgttcgatgaacttggtctccctcctatcggcaagacagagaagaccggtaaacgtagcacttcagcggcggttttagaagctcttcgcgaagtccatcccattccggacaagatcttgcagtaccgcgaaatggcgaaattgaaaggcacctatattgaccgtcttccggcattagtccacccgaaaacgggacgcctccatacccgcttcaaccaaacagccacggcgaccggtcgtttgtcctcctctgatccaaaccttcagaatattccagtacgtaccccattgggccagaagatccgccgtgcgtttgtagctgaggagggttggcgtttagtggccctcgattatcgtcaaattgaattacgtgtccttgcccatctttctggcgatgagaacctcatccgcgtgtttcaggaaggcaaagacattcacactcaaacggcaagctggatgtttggattatcagctgaagcgatcgatcctttgatgcgtcgtgcagcgaagaccatcaatttcggtgttctctacggtatgagtgcctttcgtttgtcgcaggaattaggcattccctatgaagaagctcaggcgttcattcagaaatactttcaaagctatcccaaagttaaagcatggatcgagaagactctccgtgaaggccgcacacgtggttacgtagagaccttatttggacgtcgccgctatgttcccgatttaaacgctcgcgtgaaaggcaagcgtgaagccgccgaacgcatggcgttcaacatgcctgtacagggcacggcagctgacctcatgaaacttgcaatggtgcgcctttttccacaattgcgtgaagttggtgcccgcatgctcttgcaggtccacgatgaactcttgttagaagcgccaaaagagcgtgcggaagaggtggcagccctcgcgaaagaagttatggaaggcgtgtggcccttagcggtgcctcttgaagtcgaagttggtattggcgaggattggctggctgccaaagga

SEQ ID NO: 6194 - protein, 841 aa, synthetic construct
  REGION 1..841: note = Variant of DNA polymerase I from Thermus sp. strain 2.9
MHHHHHHGGSGVLPVFEPKGRVLLVDGHHLAYRNFFALKGLTTSLGEPVQGVYGFAKSLLKALKEDGDVVIVVFDAKAPSFRHEAYEAYKAGRAPTPEDFPRQLALMKELVDLLGLERLEVPGFEADDVLATLAKKAEREGYEVQILTADRDLFQLLSPRISVLHPEGHRITPEWLWEKYGLRPEQWVDFRALAGDPSDNIPGVKGIGEKTALKLLKEWGSLENLLKNLDQVKPESVREKILAHLEDLKLSRELSRVRTDLPLEVDFGRRREPDWEGLKAFLERLEFGSLLHEFGLLESPLLAEEAPWPPPEGAFLGYRLSRPEPMWAELLALAASAQGRVYRAEDPHGALRGLFEVRGLLAKDLAVVALREGLDLPPTDDPMLLAYLLDPSNTTPEGVARRYGGEWTEDAAKRALLAERLHENLLGRLQGEERLLWLYEEVEKPLSRVLAHMEATGVKLDVAYLENLSLEVAAHMRRLEEEVFRLAGRSFRLNSRDQLERVLFDELGLPPIGKTEKTGKRSTSAAVLEALREVHPIPDKILQYREMAKLKGTYIDRLPALVHPKTGRLHTRFNQTATATGRLSSSDPNLQNIPVRTPLGQKIRRAFVAEEGWRLVALDYRQIELRVLAHLSGDENLIRVFQEGKDIHTQTASWMFGLSAEAIDPLMRRAAKTINFGVLYGMSAFRLSQELGIPYEEAQAFIQKYFQSYPKVKAWIEKTLREGRTRGYVETLFGRRRYVPDLNARVKGKREAAERMAFNMPVQGTAADLMKLAMVRLFPQLREVGARMLLQVHDELLLEAPKERAEEVAALAKEVMEGVWPLAVPLEVEVGIGEDWLAAKG

SEQ ID NO: 6195 - DNA, 2523 bp, synthetic construct
  misc_feature 1..2523: note = Variant of DNA polymerase I from Thermus sp. strain 2.9
  source 1..2523: mol_type = other DNA
atgcaccatcatcatcatcatggcggtagcggcgtgttaccggtgttcgagcctaaaggtcgcgtgcttctggttgatggccatcatctcgcgtatcgtaacttctttgccctgaaaggattaaccaccagcctgggcgagccggtacagggtgtctacggctttgcaaagtcgctcctgaaagctctgaaagaagacggtgatgtggtgattgttgtctttgatgcgaaagcgccaagttttcgccacgaagcgtacgaagcttacaaagccgggcgtgctccaacgccggaagactttcctcgccaattggcgcttatgaaggaattagtggatttgcttggcctcgaacgcttggaagttcccggtttcgaggcagacgacgtattagcgactctcgcaaagaaagccgaacgtgagggctatgaagtccagatcttgacagcagatcgcgatcttttccagcttttatctccgcgcatctcggtgttacacccggaagggcatcgtatcaccccggaatggctctgggagaaatatggtttgcgtcccgaacaatgggtggattttcgcgccttagcaggcgatccgagcgacaatattccgggagttaaaggtatcggcgagaagacggcgctcaagctccttaaagaatgggggtcgttggagaacttgcttaagaatttagatcaggtcaaaccagagtcagtgcgtgagaagattcttgctcacctcgaagacctcaaattaagccgcgaattgtcccgtgtacgcaccgatttgccgctcgaagttgatttcggtcgccgccgcgaacctgactgggagggtcttaaagcgtttttagagcgtcttgaatttggttcgctcttgcatgaattcggccttttagaaagcccgttactggccgaagaagcaccttggccaccgcccgagggcgcgtttttaggttaccgtttgagtcgcccggaaccgatgtgggccgaattactggctcttgcagcgtctgcccagggacgtgtgtatcgcgcggaagaccctcatggtgcgctccgcggcctcttcgaagtccgtggactccttgccaaagacttagctgttgttgcattgcgcgaaggtcttgatttacctccgactgatgatccaatgcttcttgcgtacctcttggacccgtcaaacacgacgcccgaaggcgtagcccgtcgttacggcggcgagtggaccgaagatgcagcgaaacgcgcgttattggccgaacgtttgcacgaaaatttattaggacgtttgcaaggcgaggaacgtctcctctggctttacgaagaagtggagaaaccattgagtcgcgtgctcgcgcatatggaagctaccggtgtcaaattagacgtggcgtatttggagaatctcagccttgaagttgctgcccacatgcgccgcttggaggaagaagtattccgtttagcaggccgttcctttcgccttaactctcgcgatcagttagaacgtgtgttgttcgatgaacttggtctccctcctatcggcaagacagagaagaccggtaaacgtagcacttcagcggcggttttagaagctcttcgcgaagtccatcccattgtggacaagatcttgcagtaccgcgaaatggcgaaattgaaaggcacctatattgaccgtcttccggcattagtccacccgaaaacgggacgcctccatacccgcttcaaccaaacagccacggcgaccggtcgtttgtcctcctctgatccaaaccttcagaatattccagtacgtaccgggttgggccagaagatccgccgtgcgtttgtagctgaggagggttggcgtttagtggccctcgattatcgtcaaattgaattacgtgtccttgcccatctttctggcgatgagaacctcatccgcgtgtttcaggaaggcaaagacattcacactcaaacggcaagctggatgtttggattatcagctgaagcgatcgatcctttgatgcgtcgtgcagcgaagaccatcaatttcggtgttctctacggtatgagtgcctttcgtttgtcgcaggaattaggcattccctatgaagaagctcaggcgttcattcagaaatactttcaaagctatcccaaagttaaagcatggatcgagaagactctccgtgaaggccgcacacgtggttacgtagagaccttatttggacgtcgccgctatgttcccgatttaaacgctcgcgtgaaaggcaagcgtgaagccgccgaacgcatggcgttcaacatgcctgtacagggcacggcagctgacctcatgaaacttgcaatggtgcgcctttttccacaattgcgtgaagttggtgcccgcatgctcttgcaggtccacgatgaactcttgttagaagcgccaaaagagcgtgcggaagaggtggcagccctcgcgaaagaagttatggaaggcgtgtggcccttagcggtgcctcttgaagtcgaagttggtattggcgaggattggctggctgccaaagga

SEQ ID NO: 6196 - protein, 841 aa, synthetic construct
  REGION 1..841: note = Variant of DNA polymerase I from Thermus sp. strain 2.9
MHHHHHHGGSGVLPVFEPKGRVLLVDGHHLAYRNFFALKGLTTSLGEPVQGVYGFAKSLLKALKEDGDVVIVVFDAKAPSFRHEAYEAYKAGRAPTPEDFPRQLALMKELVDLLGLERLEVPGFEADDVLATLAKKAEREGYEVQILTADRDLFQLLSPRISVLHPEGHRITPEWLWEKYGLRPEQWVDFRALAGDPSDNIPGVKGIGEKTALKLLKEWGSLENLLKNLDQVKPESVREKILAHLEDLKLSRELSRVRTDLPLEVDFGRRREPDWEGLKAFLERLEFGSLLHEFGLLESPLLAEEAPWPPPEGAFLGYRLSRPEPMWAELLALAASAQGRVYRAEDPHGALRGLFEVRGLLAKDLAVVALREGLDLPPTDDPMLLAYLLDPSNTTPEGVARRYGGEWTEDAAKRALLAERLHENLLGRLQGEERLLWLYEEVEKPLSRVLAHMEATGVKLDVAYLENLSLEVAAHMRRLEEEVFRLAGRSFRLNSRDQLERVLFDELGLPPIGKTEKTGKRSTSAAVLEALREVHPIVDKILQYREMAKLKGTYIDRLPALVHPKTGRLHTRFNQTATATGRLSSSDPNLQNIPVRTGLGQKIRRAFVAEEGWRLVALDYRQIELRVLAHLSGDENLIRVFQEGKDIHTQTASWMFGLSAEAIDPLMRRAAKTINFGVLYGMSAFRLSQELGIPYEEAQAFIQKYFQSYPKVKAWIEKTLREGRTRGYVETLFGRRRYVPDLNARVKGKREAAERMAFNMPVQGTAADLMKLAMVRLFPQLREVGARMLLQVHDELLLEAPKERAEEVAALAKEVMEGVWPLAVPLEVEVGIGEDWLAAKG

SEQ ID NO: 6197 - DNA, 2523 bp, synthetic construct
  misc_feature 1..2523: note = Variant of DNA polymerase I from Thermus sp. strain 2.9
  source 1..2523: mol_type = other DNA
atgcaccatcatcatcatcatggcggtagcggcgtgttaccggtgttcgagcctaaaggtcgcgtgcttctggttgatggccatcatctcgcgtatcgtaacttctttgccctgaaaggattaaccaccagcctgggcgagccggtacagggtgtctacggctttgcaaagtcgctcctgaaagctctgaaagaagacggtgatgtggtgattgttgtctttgatgcgaaagcgccaagttttcgccacgaagcgtacgaagcttacaaagccgggcgtgctccaacgccggaagactttcctcgccaattggcgcttatgaaggaattagtggatttgcttggcctcgaacgcttggaagttcccggtttcgaggcagacgacgtattagcgactctcgcaaagaaagccgaacgtgagggctatgaagtccagatcttgacagcagatcgcgatcttttccagcttttatctccgcgcatctcggtgttacacccggaagggcatcgtatcaccccggaatggctctgggagaaatatggtttgcgtcccgaacaatgggtggattttcgcgccttagcaggcgatccgagcgacaatattccgggagttaaaggtatcggcgagaagacggcgctcaagctccttaaagaatgggggtcgttggagaacttgcttaagaatttagatcaggtcaaaccagagtcagtgcgtgagaagattcttgctcacctcgaagacctcaaattaagccgcgaattgtcccgtgtacgcaccgatttgccgctcgaagttgatttcggtcgccgccgcgaacctgactgggagggtcttaaagcgtttttagagcgtcttgaatttggttcgctcttgcatgaattcggccttttagaaagcccgttactggccgaagaagcaccttggccaccgcccgagggcgcgtttttaggttaccgtttgagtcgcccggaaccgatgtgggccgaattactggctcttgcagcgtctgcccagggacgtgtgtatcgcgcggaagaccctcatggtgcgctccgcggcctcttcgaagtccgtggactccttgccaaagacttagctgttgttgcattgcgcgaaggtcttgatttacctccgactgatgatccaatgcttcttgcgtacctcttggacccgtcaaacacgacgcccgaaggcgtagcccgtcgttacggcggcgagtggaccgaagatgcagcgaaacgcgcgttattggccgaacgtttgcacgaaaatttattaggacgtttgcaaggcgaggaacgtctcctctggctttacgaagaagtggagaaaccattgagtcgcgtgctcgcgcatatggaagctaccggtgtcaaattagacgtggcgtatttggagaatctcagccttgaagttgctgcccacatgcgccgcttggaggaagaagtattccgtttagcaggccgttcctttcgccttaactctcgcgatcagttagaacgtgtgttgttcgatgaacttggtctccctcctatcggcaagacagagaagaccggtaaacgtagcacttcagcggcggttttagaagctcttcgcgaagtccatcccattgtggacaagatcttgcagtaccgcgaaatggcgaaattgaaaggcacctatattgaccgtcttccggcattagtccacccgaaaacgggacgcctccatacccgcttcaaccaaacagccacggcgaccggtcgtttgtcctcctctgatccaaaccttcagaatattccagtacgtaccccattgggccagaagatccgccgtgcgtttgtagctgaggagggttggcgtttagtggccctcgattatcgtcaaattgaattacgtgtccttgcccatctttctggcgatgagaacctcatccgcgtgtttcaggaaggcaaagacattcacactcaaacggcaagctggatgtttggattatcagctgaagcgatcgatcctttgatgcgtcgtgcagcgaagaccatcaatttcggtgttctctacggtatgagtgcctttcgtttgtcgcaggaattaggcattccctatgaagaagctcaggcgttcattcagaaatactttcaaagctatcccaaagttaaagcatggatcgagaagactctccgtgaacagcgcacacgtggttacgtagagaccttatttggacgtcgccgctatgttcccgatttaaacgctcgcgtgaaaggcaagcgtgaagccgccgaacgcatggcgttcaacatgcctgtacagggcacggcagctgacctcatgaaacttgcaatggtgcgcctttttccacaattgcgtgaagttggtgcccgcatgctcttgcaggtccacgatgaactcttgttagaagcgccaaaagagcgtgcggaagaggtggcagccctcgcgaaagaagttatggaaggcgtgtggcccttagcggtgcctcttgaagtcgaagttggtattggcgaggattggctggctgccaaagga

SEQ ID NO: 6198 - protein, 841 aa, synthetic construct
  REGION 1..841: note = Variant of DNA polymerase I from Thermus sp. strain 2.9
MHHHHHHGGSGVLPVFEPKGRVLLVDGHHLAYRNFFALKGLTTSLGEPVQGVYGFAKSLLKALKEDGDVVIVVFDAKAPSFRHEAYEAYKAGRAPTPEDFPRQLALMKELVDLLGLERLEVPGFEADDVLATLAKKAEREGYEVQILTADRDLFQLLSPRISVLHPEGHRITPEWLWEKYGLRPEQWVDFRALAGDPSDNIPGVKGIGEKTALKLLKEWGSLENLLKNLDQVKPESVREKILAHLEDLKLSRELSRVRTDLPLEVDFGRRREPDWEGLKAFLERLEFGSLLHEFGLLESPLLAEEAPWPPPEGAFLGYRLSRPEPMWAELLALAASAQGRVYRAEDPHGALRGLFEVRGLLAKDLAVVALREGLDLPPTDDPMLLAYLLDPSNTTPEGVARRYGGEWTEDAAKRALLAERLHENLLGRLQGEERLLWLYEEVEKPLSRVLAHMEATGVKLDVAYLENLSLEVAAHMRRLEEEVFRLAGRSFRLNSRDQLERVLFDELGLPPIGKTEKTGKRSTSAAVLEALREVHPIVDKILQYREMAKLKGTYIDRLPALVHPKTGRLHTRFNQTATATGRLSSSDPNLQNIPVRTPLGQKIRRAFVAEEGWRLVALDYRQIELRVLAHLSGDENLIRVFQEGKDIHTQTASWMFGLSAEAIDPLMRRAAKTINFGVLYGMSAFRLSQELGIPYEEAQAFIQKYFQSYPKVKAWIEKTLREQRTRGYVETLFGRRRYVPDLNARVKGKREAAERMAFNMPVQGTAADLMKLAMVRLFPQLREVGARMLLQVHDELLLEAPKERAEEVAALAKEVMEGVWPLAVPLEVEVGIGEDWLAAKG

SEQ ID NO: 6199 - DNA, 2523 bp, synthetic construct
  misc_feature 1..2523: note = Variant of DNA polymerase I from Thermus sp. strain 2.9
  source 1..2523: mol_type = other DNA
atgcaccatcatcatcatcatggcggtagcggcgtgttaccggtgttcgagcctaaaggtcgcgtgcttctggttgatggccatcatctcgcgtatcgtaacttctttgccctgaaaggattaaccaccagcctgggcgagccggtacagggtgtctacggctttgcaaagtcgctcctgaaagctctgaaagaagacggtgatgtggtgattgttgtctttgatgcgaaagcgccaagttttcgccacgaagcgtacgaagcttacaaagccgggcgtgctccaacgccggaagactttcctcgccaattggcgcttatgaaggaattagtggatttgcttggcctcgaacgcttggaagttcccggtttcgaggcagacgacgtattagcgactctcgcaaagaaagccgaacgtgagggctatgaagtccagatcttgacagcagatcgcgatcttttccagcttttatctccgcgcatctcggtgttacacccggaagggcatcgtatcaccccggaatggctctgggagaaatatggtttgcgtcccgaacaatgggtggattttcgcgccttagcaggcgatccgagcgacaatattccgggagttaaaggtatcggcgagaagacggcgctcaagctccttaaagaatgggggtcgttggagaacttgcttaagaatttagatcaggtcaaaccagagtcagtgcgtgagaagattcttgctcacctcgaagacctcaaattaagccgcgaattgtcccgtgtacgcaccgatttgccgctcgaagttgatttcggtcgccgccgcgaacctgactgggagggtcttaaagcgtttttagagcgtcttgaatttggttcgctcttgcatgaattcggccttttagaaagcccgttactggccgaagaagcaccttggccaccgcccgagggcgcgtttttaggttaccgtttgagtcgcccggaaccgatgtgggccgaattactggctcttgcagcgtctgcccagggacgtgtgtatcgcgcggaagaccctcatggtgcgctccgcggcctcttcgaagtccgtggactccttgccaaagacttagctgttgttgcattgcgcgaaggtcttgatttacctccgactgatgatccaatgcttcttgcgtacctcttggacccgtcaaacacgacgcccgaaggcgtagcccgtcgttacggcggcgagtggaccgaagatgcagcgaaacgcgcgttattggccgaacgtttgcacgaaaatttattaggacgtttgcaaggcgaggaacgtctcctctggctttacgaagaagtggagaaaccattgagtcgcgtgctcgcgcatatggaagctaccggtgtcaaattagacgtggcgtatttggagaatctcagccttgaagttgctgcccacatgcgccgcttggaggaagaagtattccgtttagcaggccgttcctttcgccttaactctcgcgatcagttagaacgtgtgttgttcgatgaacttggtctccctcctatcggcaagacagagaagaccggtaaacgtagcacttcagcggcggttttagaagctcttcgcgaagtccatcccattgtggacaagatcttgcagtaccgcgaaatggcgaaattgaaaggcacctatattgaccgtcttccggcattagtccacccgaaaacgggacgcctccatacccgcttcaaccaaacagccacggcgaccggtcgtttgtcctcctctgatccaaaccttcagaatattccagtacgtaccccattgggccagaagatccgccgtgcgtttgtagctgaggagggttggcgtttagtggccctcgattatcgtcaaattgaattacgtgtccttgcccatctttctggcgatgagaacctcatccgcgtgtttcaggaaggcaaagacattcacactcaaacggcaagctggatgtttggattatcagctgaagcgatcgatcctttgatgcgtcgtgcagcgaagaccatcaatttcggtgttctctacggtatgagtgcctttcgtttgtcgcaggaattaggcattccctatgaagaagctcaggcgttcattcagaaatactttcaaagctatcccaaagttaaagcatggatcgagaagactctccgtgaaggccgcacacgtggttacgtagagaccttatttggacgtcgccgctatgttcccgatttaaacgctcgcgtgaaaggcaagcgtgaagccgccgaacgcatggcgttcaacatgcctgtacagggcacggcagctgacctcatgaaacttgcaatggtgcgcctttttccacaattgcgtgaagttggtgcccgcatgctcttgctggtccacgatgaactcttgttagaagcgccaaaagagcgtgcggaagaggtggcagccctcgcgaaagaagttatggaaggcgtgtggcccttagcggtgcctcttgaagtcgaagttggtattggcgaggattggctggctgccaaagga

SEQ ID NO: 6200 - protein, 841 aa, synthetic construct
  REGION 1..841: note = Variant of DNA polymerase I from Thermus sp. strain 2.9
MHHHHHHGGSGVLPVFEPKGRVLLVDGHHLAYRNFFALKGLTTSLGEPVQGVYGFAKSLLKALKEDGDVVIVVFDAKAPSFRHEAYEAYKAGRAPTPEDFPRQLALMKELVDLLGLERLEVPGFEADDVLATLAKKAEREGYEVQILTADRDLFQLLSPRISVLHPEGHRITPEWLWEKYGLRPEQWVDFRALAGDPSDNIPGVKGIGEKTALKLLKEWGSLENLLKNLDQVKPESVREKILAHLEDLKLSRELSRVRTDLPLEVDFGRRREPDWEGLKAFLERLEFGSLLHEFGLLESPLLAEEAPWPPPEGAFLGYRLSRPEPMWAELLALAASAQGRVYRAEDPHGALRGLFEVRGLLAKDLAVVALREGLDLPPTDDPMLLAYLLDPSNTTPEGVARRYGGEWTEDAAKRALLAERLHENLLGRLQGEERLLWLYEEVEKPLSRVLAHMEATGVKLDVAYLENLSLEVAAHMRRLEEEVFRLAGRSFRLNSRDQLERVLFDELGLPPIGKTEKTGKRSTSAAVLEALREVHPIVDKILQYREMAKLKGTYIDRLPALVHPKTGRLHTRFNQTATATGRLSSSDPNLQNIPVRTPLGQKIRRAFVAEEGWRLVALDYRQIELRVLAHLSGDENLIRVFQEGKDIHTQTASWMFGLSAEAIDPLMRRAAKTINFGVLYGMSAFRLSQELGIPYEEAQAFIQKYFQSYPKVKAWIEKTLREGRTRGYVETLFGRRRYVPDLNARVKGKREAAERMAFNMPVQGTAADLMKLAMVRLFPQLREVGARMLLLVHDELLLEAPKERAEEVAALAKEVMEGVWPLAVPLEVEVGIGEDWLAAKG

SEQ ID NO: 6201 - DNA, 2523 bp, synthetic construct
  misc_feature 1..2523: note = Variant of DNA polymerase I from Thermus sp. strain 2.9
  source 1..2523: mol_type = other DNA
atgcaccatcatcatcatcatggcggtagcggcgtgttaccggtgttcgagcctaaaggtcgcgtgcttctggttgatggccatcatctcgcgtatcgtaacttctttgccctgaaaggattaaccaccagcctgggcgagccggtacagggtgtctacggctttgcaaagtcgctcctgaaagctctgaaagaagacggtgatgtggtgattgttgtctttgatgcgaaagcgccaagttttcgccacgaagcgtacgaagcttacaaagccgggcgtgctccaacgccggaagactttcctcgccaattggcgcttatgaaggaattagtggatttgcttggcctcgaacgcttggaagttcccggtttcgaggcagacgacgtattagcgactctcgcaaagaaagccgaacgtgagggctatgaagtccagatcttgacagcagatcgcgatcttttccagcttttatctccgcgcatctcggtgttacacccggaagggcatcgtatcaccccggaatggctctgggagaaatatggtttgcgtcccgaacaatgggtggattttcgcgccttagcaggcgatccgagcgacaatattccgggagttaaaggtatcggcgagaagacggcgctcaagctccttaaagaatgggggtcgttggagaacttgcttaagaatttagatcaggtcaaaccagagtcagtgcgtgagaagattcttgctcacctcgaagacctcaaattaagccgcgaattgtcccgtgtacgcaccgatttgccgctcgaagttgatttcggtcgccgccgcgaacctgactgggagggtcttaaagcgtttttagagcgtcttgaatttggttcgctcttgcatgaattcggccttttagaaagcccgttactggccgaagaagcaccttggccaccgcccgagggcgcgtttttaggttaccgtttgagtcgcccggaaccgatgtgggccgaattactggctcttgcagcgtctgcccagggacgtgtgtatcgcgcggaagaccctcatggtgcgctccgcggcctcttcgaagtccgtggactccttgccaaagacttagctgttgttgcattgcgcgaaggtcttgatttacctccgactgatgatccaatgcttcttgcgtacctcttggacccgtcaaacacgacgcccgaaggcgtagcccgtcgttacggcggcgagtggaccgaagatgcagcgaaacgcgcgttagctgccgaacgtttgcacgaaaatttattaggacgtttgcaaggcgaggaacgtctcctctggctttacgaagaagtggagaaaccattgagtcgcgtgctcgcgcatatggaagctaccggtgtcaaattagacgtggcgtatttggagaatctcagccttgaagttgctgcccacatgcgccgcttggaggaagaagtattccgtttagcaggccgttcctttcgccttaactctcgcgatcagttagaacgtgtgttgttcgatgaacttggtctccctcctatcggcaagacagagaagaccggtaaacgtagcacttcagcggcggttttagaagctcttcgcgaagtccatcccattgtggacaagatcttgcagtaccgcgaaatggcgaaattgaaaggcacctatattgaccgtcttccggcattagtccacccgaaaacgggacgcctccatacccgcttcaaccaaacagccacggcgaccggtcgtttgtcctcctctgatccaaaccttcagaatattccagtacgtaccccattgggccagaagatccgccgtgcgtttgtagctgaggagggttggcgtttagtggccctcgattatcgtcaaattgaattacgtgtccttgcccatctttctggcgatgagaacctcatccgcgtgtttcaggaaggcaaagacattcacactcaaacggcaagctggatgtttggattatcagctgaagcgatcgatcctttgatgcgtcgtgcagcgaagaccatcaatttcggtgttctctacggtatgagtgcctttcgtttgtcgcaggaattaggcattccctatgaagaagctcaggcgttcattcagaaatactttcaaagctatcccaaagttaaagcatggatcgagaagactctccgtgaaggccgcacacgtggttacgtagagaccttatttggacgtcgccgctatgttcccgatttaaacgctcgcgtgaaaggcaagcgtgaagccgccgaacgcatggcgttcaacatgcctgtacagggcacggcagctgacctcatgaaacttgcaatggtgcgcctttttccacaattgcgtgaagttggtgcccgcatgctcttgcaggtccacgatgaactcttgttagaagcgccaaaagagcgtgcggaagaggtggcagccctcgcgaaagaagttatggaaggcgtgtggcccttagcggtgcctcttgaagtcgaagttggtattggcgaggattggctggctgccaaagga

SEQ ID NO: 6202 - protein, 841 aa, synthetic construct
  REGION 1..841: note = Variant of DNA polymerase I from Thermus sp. strain 2.9
MHHHHHHGGSGVLPVFEPKGRVLLVDGHHLAYRNFFALKGLTTSLGEPVQGVYGFAKSLLKALKEDGDVVIVVFDAKAPSFRHEAYEAYKAGRAPTPEDFPRQLALMKELVDLLGLERLEVPGFEADDVLATLAKKAEREGYEVQILTADRDLFQLLSPRISVLHPEGHRITPEWLWEKYGLRPEQWVDFRALAGDPSDNIPGVKGIGEKTALKLLKEWGSLENLLKNLDQVKPESVREKILAHLEDLKLSRELSRVRTDLPLEVDFGRRREPDWEGLKAFLERLEFGSLLHEFGLLESPLLAEEAPWPPPEGAFLGYRLSRPEPMWAELLALAASAQGRVYRAEDPHGALRGLFEVRGLLAKDLAVVALREGLDLPPTDDPMLLAYLLDPSNTTPEGVARRYGGEWTEDAAKRALAAERLHENLLGRLQGEERLLWLYEEVEKPLSRVLAHMEATGVKLDVAYLENLSLEVAAHMRRLEEEVFRLAGRSFRLNSRDQLERVLFDELGLPPIGKTEKTGKRSTSAAVLEALREVHPIVDKILQYREMAKLKGTYIDRLPALVHPKTGRLHTRFNQTATATGRLSSSDPNLQNIPVRTPLGQKIRRAFVAEEGWRLVALDYRQIELRVLAHLSGDENLIRVFQEGKDIHTQTASWMFGLSAEAIDPLMRRAAKTINFGVLYGMSAFRLSQELGIPYEEAQAFIQKYFQSYPKVKAWIEKTLREGRTRGYVETLFGRRRYVPDLNARVKGKREAAERMAFNMPVQGTAADLMKLAMVRLFPQLREVGARMLLQVHDELLLEAPKERAEEVAALAKEVMEGVWPLAVPLEVEVGIGEDWLAAKG

SEQ ID NO: 6203 - DNA, 2523 bp, synthetic construct
  misc_feature 1..2523: note = Variant of DNA polymerase I from Thermus sp. strain 2.9
  source 1..2523: mol_type = other DNA
atgcaccatcatcatcatcatggcggtagcggcgtgttaccggtgttcgagcctaaaggtcgcgtgcttctggttgatggccatcatctcgcgtatcgtaacttctttgccctgaaaggattaaccaccagcctgggcgagccggtacagggtgtctacggctttgcaaagtcgctcctgaaagctctgaaagaagacggtgatgtggtgattgttgtctttgatgcgaaagcgccaagttttcgccacgaagcgtacgaagcttacaaagccgggcgtgctccaacgccggaagactttcctcgccaattggcgcttatgaaggaattagtggatttgcttggcctcgaacgcttggaagttcccggtttcgaggcagacgacgtattagcgactctcgcaaagaaagccgaacgtgagggctatgaagtccagatcttgacagcagatcgcgatcttttccagcttttatctccgcgcatctcggtgttacacccggaagggcatcgtatcaccccggaatggctctgggagaaatatggtttgcgtcccgaacaatgggtggattttcgcgccttagcaggcgatccgagcgacaatattccgggagttaaaggtatcggcgagaagacggcgctcaagctccttaaagaatgggggtcgttggagaacttgcttaagaatttagatcaggtcaaaccagagtcagtgcgtgagaagattcttgctcacctcgaagacctcaaattaagccgcgaattgtcccgtgtacgcaccgatttgccgctcgaagttgatttcggtcgccgccgcgaacctgactgggagggtcttaaagcgtttttagagcgtcttgaatttggttcgctcttgcatgaattcggccttttagaaagcccgttactggccgaagaagcaccttggccaccgcccgagggcgcgtttttaggttaccgtttgagtcgcccggaaccgatgtgggccgaattactggctcttgcagcgtctgcccagggacgtgtgtatcgcgcggaagaccctcatggtgcgctccgcggcctcttcgaagtccgtggactccttgccaaagacttagctgttgttgcattgcgcgaaggtcttgatttacctccgactgatgatccaatgcttcttgcgtacctcttggacccgtcaaacacgacgcccgaaggcgtagcccgtcgttacggcggcgagtggaccgaagatgcagcgaaacgcgcgttattggccgaacgtttgcacgaaaatttattaggacgtttgcaaggcgaggaacgtctcctctggctttacgaagaagtggagaaaccattgagtcgcgtgctcgcgcatatggaagctaccggtgtcaaattagacgtggcgtatttggaggttcttcaccttgaagttgctgcccacatgcgccgcttggaggaagaagtattccgtttagcaggccgttcctttcgccttaactctcgcgatcagttagaacgtgtgttgttcgatgaacttggtctccctcctatcggcaagacagagaagaccggtaaacgtagcacttcagcggcggttttagaagctcttcgcgaagtccatcccattgtggacaagatcttgcagtaccgcgaaatggcgaaattgaaaggcacctatattgaccgtcttccggcattagtccacccgaaaacgggacgcctccatacccgcttcaaccaaacagccacggcgaccggtcgtttgtcctcctctgatccaaaccttcagaatattccagtacgtaccccattgggccagaagatccgccgtgcgtttgtagctgaggagggttggcgtttagtggccctcgattatcgtcaaattgaattacgtgtccttgcccatctttctggcgatgagaacctcatccgcgtgtttcaggaaggcaaagacattcacactcaaacggcaagctggatgtttggattatcagctgaagcgatcgatcctttgatgcgtcgtgcagcgaagaccatcaatttcggtgttctctacggtatgagtgcctttcgtttgtcgcaggaattaggcattccctatgaagaagctcaggcgttcattcagaaatactttcaaagctatcccaaagttaaagcatggatcgagaagactctccgtgaaggccgcacacgtggttacgtagagaccttatttggacgtcgccgctatgttcccgatttaaacgctcgcgtgaaaggcaagcgtgaagccgccgaacgcatggcgttcaacatgcctgtacagggcacggcagctgacctcatgaaacttgcaatggtgcgcctttttccacaattgcgtgaagttggtgcccgcatgctcttgcaggtccacgatgaactcttgttagaagcgccaaaagagcgtgcggaagaggtggcagccctcgcgaaagaagttatggaaggcgtgtggcccttagcggtgcctcttgaagtcgaagttggtattggcgaggattggctggctgccaaagga

SEQ ID NO: 6204 - protein, 841 aa, synthetic construct
  REGION 1..841: note = Variant of DNA polymerase I from Thermus sp. strain 2.9
MHHHHHHGGSGVLPVFEPKGRVLLVDGHHLAYRNFFALKGLTTSLGEPVQGVYGFAKSLLKALKEDGDVVIVVFDAKAPSFRHEAYEAYKAGRAPTPEDFPRQLALMKELVDLLGLERLEVPGFEADDVLATLAKKAEREGYEVQILTADRDLFQLLSPRISVLHPEGHRITPEWLWEKYGLRPEQWVDFRALAGDPSDNIPGVKGIGEKTALKLLKEWGSLENLLKNLDQVKPESVREKILAHLEDLKLSRELSRVRTDLPLEVDFGRRREPDWEGLKAFLERLEFGSLLHEFGLLESPLLAEEAPWPPPEGAFLGYRLSRPEPMWAELLALAASAQGRVYRAEDPHGALRGLFEVRGLLAKDLAVVALREGLDLPPTDDPMLLAYLLDPSNTTPEGVARRYGGEWTEDAAKRALLAERLHENLLGRLQGEERLLWLYEEVEKPLSRVLAHMEATGVKLDVAYLEVLHLEVAAHMRRLEEEVFRLAGRSFRLNSRDQLERVLFDELGLPPIGKTEKTGKRSTSAAVLEALREVHPIVDKILQYREMAKLKGTYIDRLPALVHPKTGRLHTRFNQTATATGRLSSSDPNLQNIPVRTPLGQKIRRAFVAEEGWRLVALDYRQIELRVLAHLSGDENLIRVFQEGKDIHTQTASWMFGLSAEAIDPLMRRAAKTINFGVLYGMSAFRLSQELGIPYEEAQAFIQKYFQSYPKVKAWIEKTLREGRTRGYVETLFGRRRYVPDLNARVKGKREAAERMAFNMPVQGTAADLMKLAMVRLFPQLREVGARMLLQVHDELLLEAPKERAEEVAALAKEVMEGVWPLAVPLEVEVGIGEDWLAAKG

SEQ ID NO: 6205 - DNA, 2523 bp, synthetic construct
  misc_feature 1..2523: note = Variant of DNA polymerase I from Thermus sp. strain 2.9
  source 1..2523: mol_type = other DNA
atgcaccatcatcatcatcatggcggtagcggcgtgttaccggtgttcgagcctaaaggtcgcgtgcttctggttgatggccatcatctcgcgtatcgtaacttctttgccctgaaaggattaaccaccagcctgggcgagccggtacagggtgtctacggctttgcaaagtcgctcctgaaagctctgaaagaagacggtgatgtggtgattgttgtctttgatgcgaaagcgccaagttttcgccacgaagcgtacgaagcttacaaagccgggcgtgctccaacgccggaagactttcctcgccaattggcgcttatgaaggaattagtggatttgcttggcctcgaacgcttggaagttcccggtttcgaggcagacgacgtattagcgactctcgcaaagaaagccgaacgtgagggctatgaagtccagatcttgacagcagatcgcgatcttttccagcttttatctccgcgcatctcggtgttacacccggaagggcatcgtatcaccccggaatggctctgggagaaatatggtttgcgtcccgaacaatgggtggattttcgcgccttagcaggcgatccgagcgacaatattccgggagttaaaggtatcggcgagaagacggcgctcaagctccttaaagaatgggggtcgttggagaacttgcttaagaatttagatcaggtcaaaccagagtcagtgcgtgagaagattcttgctcacctcgaagacctcaaattaagccgcgaattgtcccgtgtacgcaccgatttgccgctcgaagttgatttcggtcgccgccgcgaacctgactgggagggtcttaaagcgtttttagagcgtcttgaatttggttcgctcttgcatgaattcggccttttagaaagcccgttactggccgaagaagcaccttggccaccgcccgagggcgcgtttttaggttaccgtttgagtcgcccggaaccgatgtgggccgaattactggctcttgcagcgtctgcccagggacgtgtgtatcgcgcggaagaccctcatggtgcgctccgcggcctcttcgaagtccgtggactccttgccaaagacttagctgttgttgcattgcgcgaaggtcttgatttacctccgactgatgatccaatgcttcttgcgtacctcttggacccgtcaaacacgacgcccgaaggcgtagcccgtcgttacggcggcgagtggaccgaagatgcagcgaaacgcgcgttattggccgaacgtttgcacgaaaatttattaggacgtttgcaaggcgaggaacgtctcctctggctttacgaagaagtggagaaaccattgagtcgcgtgctcgcgcatatggaagctaccggtgtcaaattagacgtggcgtatttggagaatctcagccttgaagttgctgcccacatgcgccgcttggaggaagaagtattccgtttagcaggccgttcctttcgccttaactctcgcgatcagttagaacgtgtgttgttcgatgaacttggtctccctcctatcggcaagacagagaagaccggtaaacgtagcacttcagcggcggttttagaagctcttcgcgaagtccatcccattgtggacaagatcttgcagtaccgcgaaatggcgaaattgaaaggcacctatattgaccgtcttccggcattagtccacccgaaaacgggacgcctccatacccgcttcaaccaaacagccacggcgaccggtcgtttgtcctcctctgatccaaaccttcagaatattccagtacgtaccccattgggccagaagatccgccgtgcgtttgtagctgaggagggttggcgtttagtggtgctcgattatcgtcaaattgaattacgtgtccttgcccatctttctggcgatgagaacctcatccgcgtgtttcaggaaggcaaagacattcacactcaaacggcaagctggatgtttggattatcagctgaagcgatcgatcctttgatgcgtcgtgcagcgaagaccatcaatttcggtgttctctacggtatgagtgcctttcgtttgtcgcaggaattaggcattccctatgaagaagctcaggcgttcattcagaaatactttcaaagctatcccaaagttaaagcatggatcgagaagactctccgtgaaggccgcacacgtggttacgtagagaccttatttggacgtcgccgctatgttcccgatttaaacgctcgcgtgaaaggcaagcgtgaagccgccgaacgcatggcgttcaacatgcctgtacagggcacggcagctgacctcatgaaacttgcaatggtgcgcctttttccacaattgcgtgaagttggtgcccgcatgctcttgcaggtccacgatgaactcttgttagaagcgccaaaagagcgtgcggaagaggtggcagccctcgcgaaagaagttatggaaggcgtgtggcccttagcggtgcctcttgaagtcgaagttggtattggcgaggattggctggctgccaaagga

SEQ ID NO: 6206 - protein, 841 aa, synthetic construct
  REGION 1..841: note = Variant of DNA polymerase I from Thermus sp. strain 2.9
MHHHHHHGGSGVLPVFEPKGRVLLVDGHHLAYRNFFALKGLTTSLGEPVQGVYGFAKSLLKALKEDGDVVIVVFDAKAPSFRHEAYEAYKAGRAPTPEDFPRQLALMKELVDLLGLERLEVPGFEADDVLATLAKKAEREGYEVQILTADRDLFQLLSPRISVLHPEGHRITPEWLWEKYGLRPEQWVDFRALAGDPSDNIPGVKGIGEKTALKLLKEWGSLENLLKNLDQVKPESVREKILAHLEDLKLSRELSRVRTDLPLEVDFGRRREPDWEGLKAFLERLEFGSLLHEFGLLESPLLAEEAPWPPPEGAFLGYRLSRPEPMWAELLALAASAQGRVYRAEDPHGALRGLFEVRGLLAKDLAVVALREGLDLPPTDDPMLLAYLLDPSNTTPEGVARRYGGEWTEDAAKRALLAERLHENLLGRLQGEERLLWLYEEVEKPLSRVLAHMEATGVKLDVAYLENLSLEVAAHMRRLEEEVFRLAGRSFRLNSRDQLERVLFDELGLPPIGKTEKTGKRSTSAAVLEALREVHPIVDKILQYREMAKLKGTYIDRLPALVHPKTGRLHTRFNQTATATGRLSSSDPNLQNIPVRTPLGQKIRRAFVAEEGWRLVVLDYRQIELRVLAHLSGDENLIRVFQEGKDIHTQTASWMFGLSAEAIDPLMRRAAKTINFGVLYGMSAFRLSQELGIPYEEAQAFIQKYFQSYPKVKAWIEKTLREGRTRGYVETLFGRRRYVPDLNARVKGKREAAERMAFNMPVQGTAADLMKLAMVRLFPQLREVGARMLLQVHDELLLEAPKERAEEVAALAKEVMEGVWPLAVPLEVEVGIGEDWLAAKG

SEQ ID NO: 6207 - DNA, 2523 bp, synthetic construct
  misc_feature 1..2523: note = Variant of DNA polymerase I from Thermus sp. strain 2.9
  source 1..2523: mol_type = other DNA
atgcaccatcatcatcatcatggcggtagcggcgtgttaccggtgttcgagcctaaaggtcgcgtgcttctggttgatggccatcatctcgcgtatcgtaacttctttgccctgaaaggattaaccaccagccgcggcgagccggtacagggtgtctacggctttgcaaagtcgctcctgaaagctctgaaagaagacggtgatgtggtgattgttgtctttgatgcgaaagcgccaagttttcgccacgaagcgtacgaagcttacaaagccgggcgtgctccaacgccggaagactttcctcgccaattggcgcttatgaaggaattagtggatttgcttggcctcgaacgcttggaagttcccggtttcgaggcagacgacgtattagcgactctcgcaaagaaagccgaacgtgagggctatgaagtccagatcttgacagcagatcgcgatcttttccagcttttatctccgcgcatctcggtgttacacccggaagggcatcgtatcaccccggaatggctctgggagaaatatggtttgcgtcccgaacaatgggtggattttcgcgccttagcaggcgatccgagcgacaatattccgggagttaaaggtatcggcgagaagacggcgctcaagctccttaaagaatgggggtcgttggagaacttgcttaagaatttagatcaggtcaaaccagagtcagtgcgtgagaagattcttgctcacctcgaagacctcaaattaagccgcgaattgtcccgtgtacgcaccgatttgccgctcgaagttgatttcggtcgccgccgcgaacctgactgggagggtcttaaagcgtttttagagcgtcttgaatttggttcgctcttgcatgaattcggccttttagaaagcccgttactggccgaagaagcaccttggccaccgcccgagggcgcgtttttaggttaccgtttgagtcgcccggaaccgatgtgggccgaattactggctcttgcagcgtctgcccagggacgtgtgtatcgcgcggaagaccctcatggtgcgctccgcggcctcttcgaagtccgtggactccttgccaaagacttagctgttgttgcattgcgcgaaggtcttgatttacctccgactgatgatccaatgcttcttgcgtacctcttggacccgtcaaacacgacgcccgaaggcgtagcccgtcgttacggcggcgagtggaccgaagatgcagcgaaacgcgcgttattggccgaacgtttgcacgcaaatttattaggacgtttgcaaggcgaggaacgtctcctctggctttacgaagaagtggagaaaccattgagtcgcgtgctcgcgcatatggaagctaccggtgtcaaattagacgtggcgtatttggagaatctcagccttgaagttgctgcccacatgcgccgcttggaggaagaagtattccgtttagcaggccgttcctttcgccttaactctcgcgatcagttagaacgtgtgttgttcgatgaacttggtctccctcctatcggcaagacagagaagaccggtaaacgtagcacttcagcggcggttttagaagctcttcgcgaagtccatcccattgtggacaagatcttgcagtaccgcgaaatggcgaaattgaaaggcacctatattgaccgtcttccggcattagtccacccgaaaacgggacgcctccatacccgcttcaaccaaacagccacggcgaccggtcgtttgtcctcctctgatccaaaccttcagaatattccagtacgtaccccattgggccagaagatccgccgtgcgtttgtagctgaggagggttggcgtttagtggccctcgattatcgtcaaattgaattacgtgtccttgcccatctttctggcgatgagaacctcatccgcgtgtttcaggaaggcaaagacattcacactcaaacggcaagctggatgtttggattatcagctgaagcgatcgatcctttgatgcgtcgtgcagcgaagaccatcaatttcggtgttctctacggtatgagtgcctttcgtttgtcgcaggaattaggcattccctatgaagaagctcaggcgttcattcagaaatactttcaaagctatcccaaagttaaagcatggatcgagaagactctccgtgaaggccgcacacgtggttacgtagagaccttatttggacgtcgccgctatgttcccgatttaaacgctcgcgtgaaaggcaagcgtgaagccgccgaacgcatggcgttcaacatgcctgtacagggcacggcagctgacctcatgaaacttgcaatggtgcgcctttttccacaattgcgtgaagttggtgcccgcatgctcttgcaggtccacgatgaactcttgttagaagcgccaaaagagcgtgcggaagaggtggcagccctcgcgaaagaagttatggaaggcgtgtggcccttagcggtgcctcttgaagtcgaagttggtattggcgaggattggctggctgccaaagga

SEQ ID NO: 6208 - protein, 841 aa, synthetic construct
  REGION 1..841: note = Variant of DNA polymerase I from Thermus sp. strain 2.9
MHHHHHHGGSGVLPVFEPKGRVLLVDGHHLAYRNFFALKGLTTSRGEPVQGVYGFAKSLLKALKEDGDVVIVVFDAKAPSFRHEAYEAYKAGRAPTPEDFPRQLALMKELVDLLGLERLEVPGFEADDVLATLAKKAEREGYEVQILTADRDLFQLLSPRISVLHPEGHRITPEWLWEKYGLRPEQWVDFRALAGDPSDNIPGVKGIGEKTALKLLKEWGSLENLLKNLDQVKPESVREKILAHLEDLKLSRELSRVRTDLPLEVDFGRRREPDWEGLKAFLERLEFGSLLHEFGLLESPLLAEEAPWPPPEGAFLGYRLSRPEPMWAELLALAASAQGRVYRAEDPHGALRGLFEVRGLLAKDLAVVALREGLDLPPTDDPMLLAYLLDPSNTTPEGVARRYGGEWTEDAAKRALLAERLHANLLGRLQGEERLLWLYEEVEKPLSRVLAHMEATGVKLDVAYLENLSLEVAAHMRRLEEEVFRLAGRSFRLNSRDQLERVLFDELGLPPIGKTEKTGKRSTSAAVLEALREVHPIVDKILQYREMAKLKGTYIDRLPALVHPKTGRLHTRFNQTATATGRLSSSDPNLQNIPVRTPLGQKIRRAFVAEEGWRLVALDYRQIELRVLAHLSGDENLIRVFQEGKDIHTQTASWMFGLSAEAIDPLMRRAAKTINFGVLYGMSAFRLSQELGIPYEEAQAFIQKYFQSYPKVKAWIEKTLREGRTRGYVETLFGRRRYVPDLNARVKGKREAAERMAFNMPVQGTAADLMKLAMVRLFPQLREVGARMLLQVHDELLLEAPKERAEEVAALAKEVMEGVWPLAVPLEVEVGIGEDWLAAKG

SEQ ID NO: 6209 - DNA, 2523 bp, synthetic construct
  misc_feature 1..2523: note = Variant of DNA polymerase I from Thermus sp. strain 2.9
  source 1..2523: mol_type = other DNA
atgcaccatcatcatcatcatggcggtagcggcgtgttaccggtgttcgagcctaaaggtcgcgtgcttctggttgatggccatcatctcgcgtatcgtaacttctttgccctgaaaggattaaccaccagcctgggcgagccggtacagggtgtctacggctttgcaaagtcgctcctgaaagctctgaaagaagacggtgatgtggtgattgttgtctttgatgcgaaagcgccaagttttcgccacgaagcgtacgaagcttacaaagccgggcgtgctccaacgccggaagactttcctcgccaattggcgcttatgaaggaattagtggatttgcttggcctcgaacgcttggaagttcccggtttcgaggcagacgacgtattagcgactctcgcaaagaaagccgaacgtgagggctatgaagtccagatcttgacagcagatcgcgatcttttccagcttttatctccgcgcatctcggtgttacacccggaagggcatcgtatcaccccggaatggctctgggagaaatatggtttgcgtcccgaacaatgggtggattttcgcgccttagcaggcgatccgagcgacaatattccgggagttaaaggtatcggcgagaagacggcgctcaagctccttaaagaatgggggtcgttggagaacttgcttaagaatttagatcaggtcaaaccagagtcagtgcgtgagaagattcttgctcacctcgaagacctcaaattaagccgcgaattgtcccgtgtacgcaccgatttgccgctcgaagttgatttcggtcgccgccgcgaacctgactgggagggtcttaaagcgtttttagagcgtcttgaatttggttcgctcttgcatgaattcggccttttagaaagcccgttactggccgaagaagagccttggccaccgcccgagggcgcgtttttaggttaccgtttgagtcgcccggaaccgatgtgggccgaattactggctcttgcagcgtctgcccagggacgtgtgtatcgcgcggaagaccctcatggtgcgctccgcggcctcttcgaagtccgtggactccttgccaaagacttagctgttgttgcattgcgcgaaggtcttgatttacctccgactgatgatccaatgcttcttgcgtacctcttggacccgtcaaacacgacgcccgaaggcgtagcccgtcgttacggcggcgagtggaccgaagatgcagcgaaacgcgcgttattggccgaacgtttgcacgaaaatttattaggacgtttgcaaggcgaggaacgtctcctctggctttacgaagaagtggagaaaccattgagtcgcgtgctcgcgcatatggaagctaccggtgtcaaattagacgtggcgtatttggagaatctcagccttgaagttgctgcccacatgcgccgcttggaggaagaagtattccgtttagcaggccgttcctttcgccttaactctcgcgatcagttagaacgtgtgttgttcgatgaacttggtctccctcctatcggcaagacagagaagaccggtaaacgtagcacttcagcggcggttttagaagctcttcgcgaagtccatcccattgtggacaagatcttgcagtaccgcgaaatggcgaaattgaaaggcacctatattgaccgtcttccggcattagtccacccgaaaacgggacgcctccatacccgcttcaaccaaacagccacggcgaccggtcgtttgtcctcctctgatccaaaccttcagaatattccagtacgtaccccattgggccagaagatccgccgtgcgtttgtagctgaggagggttggcgtttagtggccctcgattatcgtcaaattgaattacgtgtccttgcccatctttctggcgatgagaacctcatccgcgtgtttcaggaaggcaaagacattcacactcaaacggcaagctggatgtttggattatcagctgaagcgatcgatcctttgatgcgtcgtgcagcgaagaccatcaatttcggtgttctctacggtatgagtgcctttcgtttgtcgcaggaattaggcattccctatgaagaagctcaggcgttcattcagaaatactttcaaagctatcccaaagttaaagcatggatcgagaagactctccgtgaaggccgcacacgtggttacgtagagaccttatttggacgtcgccgctatgttcccgatttaaacgctcgcgtgaaaggcaagcgtgaagccgccgaacgcatggcgttcaacatgcctgtacagggcacggcagctgacctcatgaaacttgcaatggtgcgcctttttccacaattgcgtgaagttggtgcccgcatgctcttgcaggtccacgatgaactcttgttagaagcgccaaaagagcgtgcggaagaggtggcagccctcgcgaaagaagttatggaaggcgtgtggcccttagcggtgcctcttgaagtcgaagttggtattggcgaggattggctggctgccaaagga

SEQ ID NO: 6210 - protein, 841 aa, synthetic construct
  REGION 1..841: note = Variant of DNA polymerase I from Thermus sp. strain 2.9
MHHHHHHGGSGVLPVFEPKGRVLLVDGHHLAYRNFFALKGLTTSLGEPVQGVYGFAKSLLKALKEDGDVVIVVFDAKAPSFRHEAYEAYKAGRAPTPEDFPRQLALMKELVDLLGLERLEVPGFEADDVLATLAKKAEREGYEVQILTADRDLFQLLSPRISVLHPEGHRITPEWLWEKYGLRPEQWVDFRALAGDPSDNIPGVKGIGEKTALKLLKEWGSLENLLKNLDQVKPESVREKILAHLEDLKLSRELSRVRTDLPLEVDFGRRREPDWEGLKAFLERLEFGSLLHEFGLLESPLLAEEEPWPPPEGAFLGYRLSRPEPMWAELLALAASAQGRVYRAEDPHGALRGLFEVRGLLAKDLAVVALREGLDLPPTDDPMLLAYLLDPSNTTPEGVARRYGGEWTEDAAKRALLAERLHENLLGRLQGEERLLWLYEEVEKPLSRVLAHMEATGVKLDVAYLENLSLEVAAHMRRLEEEVFRLAGRSFRLNSRDQLERVLFDELGLPPIGKTEKTGKRSTSAAVLEALREVHPIVDKILQYREMAKLKGTYIDRLPALVHPKTGRLHTRFNQTATATGRLSSSDPNLQNIPVRTPLGQKIRRAFVAEEGWRLVALDYRQIELRVLAHLSGDENLIRVFQEGKDIHTQTASWMFGLSAEAIDPLMRRAAKTINFGVLYGMSAFRLSQELGIPYEEAQAFIQKYFQSYPKVKAWIEKTLREGRTRGYVETLFGRRRYVPDLNARVKGKREAAERMAFNMPVQGTAADLMKLAMVRLFPQLREVGARMLLQVHDELLLEAPKERAEEVAALAKEVMEGVWPLAVPLEVEVGIGEDWLAAKG

SEQ ID NO: 6211 - DNA, 2523 bp, synthetic construct
  misc_feature 1..2523: note = Variant of DNA polymerase I from Thermus sp. strain 2.9
  source 1..2523: mol_type = other DNA
atgcaccatcatcatcatcatggcggtagcggcgtgttaccggtgttcgagcctaaaggtcgcgtgcttctggttgatggccatcatctcgcgtatcgtaacttctttgccctgaaaggattaaccaccagcctgggcgagccggtacagggtgtctacggctttgcaaagtcgctcctgaaagctctgaaagaagacggtgatgtggtgattgttgtctttgatgcgaaagcgccaagttttcgccacgaagcgtacgaagcttacaaagccgggcgtgctccaacgccggaagactttcctcgccaattggcgcttatgaaggaattagtggatttgcttggcctcgaacgcttggaagttcccggtttcgaggcagacgacgtattagcgactctcgcaaagaaagccgaacgtgagggctatgaagtccagatcttgacagcagatcgcgatcttttccagcttttatctccgcgcatctcggtgttacacccggaagggcatcgtatcaccccggaatggctctgggagaaatatggtttgcgtcccgaacaatgggtggattttcgcgccttagcaggcgatccgagcgacaatattccgggagttaaaggtatcggcgagaagacggcgctcaagctccttaaagaatgggggtcgttggagaacttgcttaagaatttagatcaggtcaaaccagagtcagtgcgtgagaagattcttgctcacctcgaagacctcaaattaagccgcgaattgtcccgtgtacgcaccgatttgccgctcgaagttgatttcggtcgccgccgcgaacctgactgggagggtcttaaagcgtttttagagcgtcttgaatttggttcgctcttgcatgaattcggccttttagaaagcccgttactggccgaagaagcaccttggccaccgcccgagggcgcgtttttaggttaccgtttgagtcgcccggaaccgatgtgggccgaattactggctcttgcagcgtctgcccagggacgtgtgtatcgcgcggaagaccctcatggtgcgctccgcggcctcttcgaagtccgtggactccttgccaaagacttagctgttgttgcattgcgcgaaggtcttgatttacctccgactgatgatccaatgcttcttgcgtacctcttggacccgtcaaacacgacgcccgaaggccgggcccgtcgttacggcggcgagtggaccgaagatgcagcgaaacgcgcgttattggccgaacgtttgcacgaaaatttattaggacgtttgcaaggcgaggaacgtctcctctggctttacgaagaagtggagaaaccattgagtcgcgtgctcgcgcatatggaagctaccggtgtcaaattagacgtggcgtatttggagaatctcagccttgaagttgctgcccacatgcgccgcttggaggaagaagtattccgtttagcaggccgttcctttcgccttaactctcgcgatcagttagaacgtgtgttgttcgatgaacttggtctccctcctatcggcaagacagagaagaccggtaaacgtagcacttcagcggcggttttagaagctcttcgcgaagtccatcccattgtggacaagatcttgcagtaccgcgaaatggcgaaattgaaaggcacctatattgaccgtcttccggcattagtccacccgaaaacgggacgcctccatacccgcttcaaccaaacagccacggcgaccggtcgtttgtcctcctctgatccaaaccttcagaatattccagtacgtaccccattgggccagaagatccgccgtgcgtttgtagctgaggagggttggcgtttagtggccctcgattatcgtcaaattgaattacgtgtccttgcccatctttctggcgatgagaacctcatccgcgtgtttcaggaaggcaaagacattcacactcaaacggcaagctggatgtttggattatcagctgaagcgatcgatcctttgatgcgtcgtgcagcgaagaccatcaatttcggtgttctctacggtatgagtgcctttcgtttgtcgcaggaattaggcattccctatgaagaagctcaggcgttcattcagaaatactttcaaagctatcccaaagttaaagcatggatcgagaagactctccgtgaaggccgcacacgtggttacgtagagaccttatttggacgtcgccgctatgttcccgatttaaacgctcgcgtgaaaggcaagcgtgaagccgccgaacgcatggcgttcaacatgcctgtacagggcacggcagctgacctcatgaaacttgcaatggtgcgcctttttccacaattgcgtgaagttggtgcccgcatgctcttgcaggtccacgatgaactcttgttagaagcgccaaaagagcgtgcggaagaggtggcagccctcgcgaaagaagttatggaaggcgtgtggcccttagcggtgcctcttgaagtcgaagttggtattggcgaggattggctggctgccaaagga

SEQ ID NO: 6212 - protein, 841 aa, synthetic construct
  REGION 1..841: note = Variant of DNA polymerase I from Thermus sp. strain 2.9
MHHHHHHGGSGVLPVFEPKGRVLLVDGHHLAYRNFFALKGLTTSLGEPVQGVYGFAKSLLKALKEDGDVVIVVFDAKAPSFRHEAYEAYKAGRAPTPEDFPRQLALMKELVDLLGLERLEVPGFEADDVLATLAKKAEREGYEVQILTADRDLFQLLSPRISVLHPEGHRITPEWLWEKYGLRPEQWVDFRALAGDPSDNIPGVKGIGEKTALKLLKEWGSLENLLKNLDQVKPESVREKILAHLEDLKLSRELSRVRTDLPLEVDFGRRREPDWEGLKAFLERLEFGSLLHEFGLLESPLLAEEAPWPPPEGAFLGYRLSRPEPMWAELLALAASAQGRVYRAEDPHGALRGLFEVRGLLAKDLAVVALREGLDLPPTDDPMLLAYLLDPSNTTPEGRARRYGGEWTEDAAKRALLAERLHENLLGRLQGEERLLWLYEEVEKPLSRVLAHMEATGVKLDVAYLENLSLEVAAHMRRLEEEVFRLAGRSFRLNSRDQLERVLFDELGLPPIGKTEKTGKRSTSAAVLEALREVHPIVDKILQYREMAKLKGTYIDRLPALVHPKTGRLHTRFNQTATATGRLSSSDPNLQNIPVRTPLGQKIRRAFVAEEGWRLVALDYRQIELRVLAHLSGDENLIRVFQEGKDIHTQTASWMFGLSAEAIDPLMRRAAKTINFGVLYGMSAFRLSQELGIPYEEAQAFIQKYFQSYPKVKAWIEKTLREGRTRGYVETLFGRRRYVPDLNARVKGKREAAERMAFNMPVQGTAADLMKLAMVRLFPQLREVGARMLLQVHDELLLEAPKERAEEVAALAKEVMEGVWPLAVPLEVEVGIGEDWLAAKG

SEQ ID NO: 6213 - DNA, 2523 bp, synthetic construct
  misc_feature 1..2523: note = Variant of DNA polymerase I from Thermus sp. strain 2.9
  source 1..2523: mol_type = other DNA
atgcaccatcatcatcatcatggcggtagcggcgtgttaccggtgttcgagcctaaaggtcgcgtgcttctggttgatggccatcatctcgcgtatcgtaacttctttgccctgaaaggattaaccaccagcctgggcgagccggtacagggtgtctacggctttgcaaagtcgctcctgaaagctctgaaagaagacggtgatgtggtgattgttgtctttgatgcgaaagcgccaagttttcgccacgaagcgtacgaagcttacaaagccgggcgtgctccaacgccggaagactttcctcgccaattggcgcttatgaaggaattagtggatttgcttggcctcgaacgcttggaagttcccggtttcgaggcagacgacgtattagcgactctcgcaaagaaagccgaacgtgagggctatgaagtccagatcttgacagcagatcgcgatcttttccagcttttatctccgcgcatctcggtgttacacccggaagggcatcgtatcaccccggaatggctctgggagaaatatggtttgcgtcccgaacaatgggtggattttcgcgccttagcaggcgatccgagcgacaatattccgggagttaaaggtatcggcgagaagacggcgctcaagctccttaaagaatgggggtcgttggagaacttgcttaagaatttagatcaggtcaaaccagagtcagtgcgtgagaagattcttgctcacctcgaagacctcaaattaagccgcgaattgtcccgtgtacgcaccgatttgccgctcgaagttgatttcggtcgccgccgcgaacctgactgggagggtcttaaagcgtttttagagcgtcttgaatttggttcgctcttgcatgaattcggccttttagaaagcccgttactggccgaagaagcaccttggccaccgcccgagggcgcgtttttaggttaccgtttgagtcgcccggaaccgatgtgggccgaattactggctcttgcagcgtctgcccagggacgtgtgtatcgcgcgaaggaccctcatggtgcgctccgcggcctcttcgaagtccgtggactccttgccaaagacttagctgttgttgcattgcgcgaaggtcttgatttacctccgactgatgatccaatgcttcttgcgtacctcttggacccgtcaaacacgacgcccgaaggcgtagcccgtcgttacggcggcgagtggaccgaagatgcagcgaaacgcgcgttattggccgaacgtttgcacgaaaatttattaggacgtttgcaaggcgaggaacgtctcctctggctttacgaagaagtggagaaaccattgagtcgcgtgctcgcgcatatggaagctaccggtgtcaaattagacgtggcgtatttggagaatctcagccttgaagttgctgcccacatgcgccgcttggaggaagaagtattccgtttagcaggccgttcctttcgccttaactctcgcgatcagttagaacgtgtgttgttcgatgaacttggtctccctcctatcggcaagacagagaagaccggtaaacgtagcacttcagcggcggttttagaagctcttcgcgaagtccatcccattgtggacaagatcttgcagtaccgcgaaatggcgaaattgaaaggcacctatattgaccgtcttccggcattagtccacccgaaaacgggacgcctccatacccgcttcaaccaaacagccacggcgaccggtcgtttgtcctcctctgatccaaaccttcagaatattccagtacgtaccccattgggccagaagatccgccgtgcgtttgtagctgaggagggttggcgtttagtggccctcgattatcgtcaaattgaattacgtgtccttgcccatctttctggcgatgagaacctcatccgcgtgtttcaggaaggcaaagacattcacactcaaacggcaagctggatgtttggattatcagctgaagcgatcgatcctttgatgcgtcgtgcagcgaagaccatcaatttcggtgttctctacggtatgagtgcctttcgtttgtcgcaggaattaggcattccctatgaagaagctcaggcgttcattcagaaatactttcaaagctatcccaaagttaaagcatggatcgagaagactctccgtgaaggccgcacacgtggttacgtagagaccttatttggacgtcgccgctatgttcccgatttaaacgctcgcgtgaaaggcaagcgtgaagccgccgaacgcatggcgttcaacatgcctgtacagggcacggcagctgacctcatgaaacttgcaatggtgcgcctttttccacaattgcgtgaagttggtgcccgcatgctcttgcaggtccacgatgaactcttgttagaagcgccaaaagagcgtgcggaagaggtggcagccctcgcgaaagaagttatggaaggcgtgtggcccttagcggtgcctcttgaagtcgaagttggtattggcgaggattggctggctgccaaagga

SEQ ID NO: 6214 - protein, 841 aa, synthetic construct
  REGION 1..841: note = Variant of DNA polymerase I from Thermus sp. strain 2.9
MHHHHHHGGSGVLPVFEPKGRVLLVDGHHLAYRNFFALKGLTTSLGEPVQGVYGFAKSLLKALKEDGDVVIVVFDAKAPSFRHEAYEAYKAGRAPTPEDFPRQLALMKELVDLLGLERLEVPGFEADDVLATLAKKAEREGYEVQILTADRDLFQLLSPRISVLHPEGHRITPEWLWEKYGLRPEQWVDFRALAGDPSDNIPGVKGIGEKTALKLLKEWGSLENLLKNLDQVKPESVREKILAHLEDLKLSRELSRVRTDLPLEVDFGRRREPDWEGLKAFLERLEFGSLLHEFGLLESPLLAEEAPWPPPEGAFLGYRLSRPEPMWAELLALAASAQGRVYRAKDPHGALRGLFEVRGLLAKDLAVVALREGLDLPPTDDPMLLAYLLDPSNTTPEGVARRYGGEWTEDAAKRALLAERLHENLLGRLQGEERLLWLYEEVEKPLSRVLAHMEATGVKLDVAYLENLSLEVAAHMRRLEEEVFRLAGRSFRLNSRDQLERVLFDELGLPPIGKTEKTGKRSTSAAVLEALREVHPIVDKILQYREMAKLKGTYIDRLPALVHPKTGRLHTRFNQTATATGRLSSSDPNLQNIPVRTPLGQKIRRAFVAEEGWRLVALDYRQIELRVLAHLSGDENLIRVFQEGKDIHTQTASWMFGLSAEAIDPLMRRAAKTINFGVLYGMSAFRLSQELGIPYEEAQAFIQKYFQSYPKVKAWIEKTLREGRTRGYVETLFGRRRYVPDLNARVKGKREAAERMAFNMPVQGTAADLMKLAMVRLFPQLREVGARMLLQVHDELLLEAPKERAEEVAALAKEVMEGVWPLAVPLEVEVGIGEDWLAAKG

SEQ ID NO: 6215 - DNA, 2523 bp, synthetic construct
  misc_feature 1..2523: note = Variant of DNA polymerase I from Thermus sp. strain 2.9
  source 1..2523: mol_type = other DNA
atgcaccatcatcatcatcatggcggtagcggcgtgttaccggtgttcgagcctaaaggtcgcgtgcttctggttgatggccatcatctcgcgtatcgtaacttctttgccctgaaaggattaaccaccagcctgggcgagccggtacagggtgtctacggctttgcaaagtcgctcctgaaagctctgaaagaagacggtgatgtggtgattgttgtctttgatgcgaaagcgccaagttttcgccacgaagcgtacgaagcttacaaagccgggcgtgctccaacgccggaagactttcctcgccaattggcgcttatgaaggaattagtggatttgcttggcctcgaacgcttggaagttcccggtttcgaggcagacgacgtattagcgactctcgcaaagaaagccgaacgtgagggctatgaagtccagatcttgacagcagatcgcgatcttttccagcttttatctccgcgcatctcggtgttacacccggaagggcatcgtatcaccccggaatggctctgggagaaatatggtttgcgtcccgaacaatgggtggattttcgcgccttagcaggcgatccgagcgacaatattccgggagttaaaggtatcggcgagaagacggcgctcaagctccttaaagaatgggggtcgttggagaacttgcttaagaatttagatcaggtcaaaccagagtcagtgcgtgagaagattcttgctcacctcgaagacctcaaattaagccgcgaattgtcccgtgtacgcaccgatttgccgctcgaagttgatttcggtcgccgccgcgaacctgactgggagggtcttaaagcgtttttagagcgtcttgaatttggttcgctcttgcatgaattcggccttttagaaagcccgttactggccgaagaagcaccttggccaccgcccgagggcgcgtttttaggttaccgtttgagtcgcccggaaccgatgtgggccgaattactggctcttgcagcgtctgcccagggacgtgtgtatcgcgcggaagaccctcatggtgcgctccgcggcctcttcgaagtccgtggactccttgccaaagacttagctgttgttgcattgcgcgaaggtcttgatttacctccgactgatgatccaatgcttcttgcgtacctcttggacccgtcaaacacgacgcccgaaggcgtagcccgtcgttacggcggcgagtggaccgaagatgcagcgaaacgcgcgttattggccgaacgtttgcacgaaaatttattaggacgtttgcaaggcgaggaacgtctcctctggctttacgaagaagtggagaaaccattgagtcgcgtgctcgcgcatatggaagctaccggtgtcaaattagacgtggcgtatttggagaatctcagccttgaagttgctgcccacatgcgccgcttggaggaagaagtattccgtttagcaggccgttcctttcgccttaactctcgcgatcagttagaacgtgtgttgttcgatgaacttggttttcctcctatcggcaagacagagaagaccggtaaacgtagcacttcagcggcggttttagaagctcttcgcgaagtccatcccattgtggacaagatcttgcagtaccgcgaaatggcgaaattgaaaggcacctatattgaccgtcttccggcattagtccacccgaaaacgggacgcctccatacccgcttcaaccaaacagccacggcgaccggtcgtttgtcctcctctgatccaaaccttcagaatattccagtacgtaccccattgggccagaagatccgccgtgcgtttgtagctgaggagggttggcgtttagtggccctcgattatcgtcaaattgaattacgtgtccttgcccatctttctggcgatgagaacctcatccgcgtgtttcaggaaggcaaagacattcacactcaaacggcaagctggatgtttggattatcagctgaagcgatcgatcctttgatgcgtcgtgcagcgaagaccatcaatttcggtgttctctacggtatgagtgcctttcgtttgtcgcaggaattaggcattccctatgaagaagctcaggcgttcattcagaaatactttcaaagctatcccaaagttaaagcatggatcgagaagactctccgtgaaggccgcacacgtggttacgtagagaccttatttggacgtcgccgctatgttcccgatttaaacgctcgcgtgaaaggcaagcgtgaagccgccgaacgcatggcgttcaacatgcctgtacagggcacggcagctgacctcatgaaacttgcaatggtgcgcctttttccacaattgcgtgaagttggtgcccgcatgctcttgcaggtccacgatgaactcttgttagaagcgccaaaagagcgtgcggaagaggtggcagccctcgcgaaagaagttatggaaggcgtgtggcccttagcggtgcctcttgaagtcgaagttggtattggcgaggattggctggctgccaaagga

SEQ ID NO: 6216 - protein, 841 aa, synthetic construct
  REGION 1..841: note = Variant of DNA polymerase I from Thermus sp. strain 2.9
MHHHHHHGGSGVLPVFEPKGRVLLVDGHHLAYRNFFALKGLTTSLGEPVQGVYGFAKSLLKALKEDGDVVIVVFDAKAPSFRHEAYEAYKAGRAPTPEDFPRQLALMKELVDLLGLERLEVPGFEADDVLATLAKKAEREGYEVQILTADRDLFQLLSPRISVLHPEGHRITPEWLWEKYGLRPEQWVDFRALAGDPSDNIPGVKGIGEKTALKLLKEWGSLENLLKNLDQVKPESVREKILAHLEDLKLSRELSRVRTDLPLEVDFGRRREPDWEGLKAFLERLEFGSLLHEFGLLESPLLAEEAPWPPPEGAFLGYRLSRPEPMWAELLALAASAQGRVYRAEDPHGALRGLFEVRGLLAKDLAVVALREGLDLPPTDDPMLLAYLLDPSNTTPEGVARRYGGEWTEDAAKRALLAERLHENLLGRLQGEERLLWLYEEVEKPLSRVLAHMEATGVKLDVAYLENLSLEVAAHMRRLEEEVFRLAGRSFRLNSRDQLERVLFDELGFPPIGKTEKTGKRSTSAAVLEALREVHPIVDKILQYREMAKLKGTYIDRLPALVHPKTGRLHTRFNQTATATGRLSSSDPNLQNIPVRTPLGQKIRRAFVAEEGWRLVALDYRQIELRVLAHLSGDENLIRVFQEGKDIHTQTASWMFGLSAEAIDPLMRRAAKTINFGVLYGMSAFRLSQELGIPYEEAQAFIQKYFQSYPKVKAWIEKTLREGRTRGYVETLFGRRRYVPDLNARVKGKREAAERMAFNMPVQGTAADLMKLAMVRLFPQLREVGARMLLQVHDELLLEAPKERAEEVAALAKEVMEGVWPLAVPLEVEVGIGEDWLAAKG

SEQ ID NO: 6217 - DNA, 2523 bp, synthetic construct
  misc_feature 1..2523: note = Variant of DNA polymerase I from Thermus sp. strain 2.9
  source 1..2523: mol_type = other DNA
atgcaccatcatcatcatcatggcggtagcggcgtgttaccggtgttcgagcctaaaggtcgcgtgcttctggttgatggccatcatctcgcgtatcgtaacttctttgccctgaaaggattaaccaccagcctgggcgagccggtacagggtgtctacggctttgcaaagtcgctcctgaaagctctgaaagaagacggtgatgtggtgattgttgtctttgatgcgaaagcgccaagttttcgccacgaagcgtacgaagcttacaaagccgggcgtgctccaacgccggaagactttcctcgccaattggcgcttatgaaggaattagtggatttgcttggcctcgaacgcttggaagttcccggtttcgaggcagacgacgtattagcgactctcgcaaagaaagccgaacgtgagggctatgaagtccagatcttgacagcagatcgcgatcttttccagcttttatctccgcgcatctcggtgttacacccggaagggcatcgtatcaccccggaatggctctgggagaaatatggtttgcgtcccgaacaatgggtggattttcgcgccttagcaggcgatccgagcgacaatattccgggagttaaaggtatcggcgagaagacggcgctcaagctccttaaagaatgggggtcgttggagaacttgcttaagaatttagatcaggtcaaaccagagtcagtgcgtgagaagattcttgctcacctcgaagacctcaaattaagccgcgaattgtcccgtgtacgcaccgatttgccgctcgaagttgatttcggtcgccgccgcgaacctgactgggagggtcttaaagcgtttttagagcgtcttgaatttggttcgctcttgcatgaattcggccttttagaaagcccgttactggccgaagaagcaccttggccaccgcccgagggcgcgtttttaggttaccgtttgagtcgcccggaaccgatgtgggccgaattactggctcttgcagcgtctgcccagggacgtgtgtatcgcgcggaagaccctcatggtgcgctccgcggcctcttcgaagtccgtggactccttgccaaagacttagctgttgttgcattgcgcgaatttcttgatttacctccgactgatgatccaatgcttcttgcgtacctcttggacccgtcaaacacgacgcccgaaggcgtagcccgtcgttacggcggcgagtggaccgaagatgcagcgaaacgcgcgttattggccgaacgtttgcacgaaaatttattaggacgtttgcaaggcgaggaacgtctcctctggctttacgaagaagtggagaaaccattgagtcgcgtgctcgcgcatatggaagctaccggtgtcaaattagacgtggcgtatttggagaatctcagccttgaagttgctgcccacatgcgccgcttggaggaagaagtattccgtttagcaggccgttcctttcgccttaactctcgcgatcagttagaacgtgtgttgttcgatgaacttggtctccctcctatcggcaagacagagaagaccggtaaacgtagcacttcagcggcggttttagaagctcttcgcgaagtccatcccattgtggacaagatcttgcagtaccgcgaaatggcgaaattgaaaggcacctatattgaccgtcttccggcattagtccacccgaaaacgggacgcctccatacccgcttcaaccaaacagccacggcgaccggtcgtttgtcctcctctgatccaaaccttcagaatattccagtacgtaccccattgggccagaagatccgccgtgcgtttgtagctgaggagggttggcgtttagtggccctcgattatcgtcaaattgaattacgtgtccttgcccatctttctggcgatgagaacctcatccgcgtgtttcaggaaggcaaagacattcacactcaaacggcaagctggatgtttggattatcagctgaagcgatcgatcctttgatgcgtcgtgcagcgaagaccatcaatttcggtgttctctacggtatgagtgcctttcgtttgtcgcaggaattaggcattccctatgaagaagctcaggcgttcattcagaaatactttcaaagctatcccaaagttaaagcatggatcgagaagactctccgtgaaggccgcacacgtggttacgtagagaccttatttggacgtcgccgctatgttcccgatttaaacgctcgcgtgaaaggcaagcgtgaagccgccgaacgcatggcgttcaacatgcctgtacagggcacggcagctgacctcatgaaacttgcaatggtgcgcctttttccacaattgcgtgaagttggtgcccgcatgctcttgcaggtccacgatgaactcttgttagaagcgccaaaagagcgtgcggaagaggtggcagccctcgcgaaagaagttatggaaggcgtgtggcccttagcggtgcctcttgaagtcgaagttggtattggcgaggattggctggctgccaaagga

SEQ ID NO: 6218 - protein, 841 aa, synthetic construct
  REGION 1..841: note = Variant of DNA polymerase I from Thermus sp. strain 2.9
MHHHHHHGGSGVLPVFEPKGRVLLVDGHHLAYRNFFALKGLTTSLGEPVQGVYGFAKSLLKALKEDGDVVIVVFDAKAPSFRHEAYEAYKAGRAPTPEDFPRQLALMKELVDLLGLERLEVPGFEADDVLATLAKKAEREGYEVQILTADRDLFQLLSPRISVLHPEGHRITPEWLWEKYGLRPEQWVDFRALAGDPSDNIPGVKGIGEKTALKLLKEWGSLENLLKNLDQVKPESVREKILAHLEDLKLSRELSRVRTDLPLEVDFGRRREPDWEGLKAFLERLEFGSLLHEFGLLESPLLAEEAPWPPPEGAFLGYRLSRPEPMWAELLALAASAQGRVYRAEDPHGALRGLFEVRGLLAKDLAVVALREFLDLPPTDDPMLLAYLLDPSNTTPEGVARRYGGEWTEDAAKRALLAERLHENLLGRLQGEERLLWLYEEVEKPLSRVLAHMEATGVKLDVAYLENLSLEVAAHMRRLEEEVFRLAGRSFRLNSRDQLERVLFDELGLPPIGKTEKTGKRSTSAAVLEALREVHPIVDKILQYREMAKLKGTYIDRLPALVHPKTGRLHTRFNQTATATGRLSSSDPNLQNIPVRTPLGQKIRRAFVAEEGWRLVALDYRQIELRVLAHLSGDENLIRVFQEGKDIHTQTASWMFGLSAEAIDPLMRRAAKTINFGVLYGMSAFRLSQELGIPYEEAQAFIQKYFQSYPKVKAWIEKTLREGRTRGYVETLFGRRRYVPDLNARVKGKREAAERMAFNMPVQGTAADLMKLAMVRLFPQLREVGARMLLQVHDELLLEAPKERAEEVAALAKEVMEGVWPLAVPLEVEVGIGEDWLAAKG

SEQ ID NO: 6219 - DNA, 2523 bp, synthetic construct
  misc_feature 1..2523: note = Variant of DNA polymerase I from Thermus sp. strain 2.9
  source 1..2523: mol_type = other DNA
atgcaccatcatcatcatcatggcggtagcggcgtgttaccggtgttcgagcctaaaggtcgcgtgcttctggttgatggccatcatctcgcgtatcgtaacttctttgccctgaaaggattaaccaccagcctgggcgagccggtacagggtgtctacggctttgcaaagtcgctcctgaaagctctgaaagaagacggtgatgtggtgattgttgtctttgatgcgaaagcgccaagttttcgccacgaagcgtacgaagcttacaaagccgggcgtgctccaacgccggaagactttcctcgccaattggcgcttatgaaggaattagtggatttgcttggcctcgaacgcttggaagttcccggtttcgaggcagacgacgtattagcgactctcgcaaagaaagccgaacgtgagggctatgaagtccagatcttgacagcagatcgcgatcttttccagcttttatctccgcgcatctcggtgttacacccggaagggcatcgtatcaccccggaatggctctgggagaaatatggtttgcgtcccgaacaatgggtggattttcgcgccttagcaggcgatccgagcgacaatattccgggagttaaaggtatcggcgagaagacggcgctcaagctccttaaagaatgggggtcgttggagaacttgcttaagaatttagatcaggtcaaaccagagtcagtgcgtgagaagattcttgctcacctcgaagacctcaaattaagccgcgaattgtcccgtgtacgcaccgatttgccgctcgaagttgatttcggtcgccgccgcgaacctgactgggagggtcttaaagcgtttttagagcgtcttgaatttggttcgctcttgcatgaattcggccttttagaaagcccgttactggccgaagaagcaccttggccaccgcccgagggcgcgtttttaggttaccgtttgagtcgcccggaaccgatgtgggccgaattactggctcttgcagcgtctgcccagggacgtgtgtatcgcgcggaagaccctcatggtgcgctccgcggcctcttcgaagtccgtggactccttgccaaagacttagctgttgttgcattgcgcgaaggtcttgatttacctccgactgatgatccaatgcttcttgcgtacctcttggacccgtcaaacacgacgcccgaaggcgtagcccgtcgttacggcggcgagtggaccgaagatgcagcgaaacgcgcgttattggccgaacgtttgcacgaaaatttattaggacgtttgcaaggcgaggaacgtctcctctggctttacgaagaagtggagaaaccattgagtcgcgtgctcgcgcatatggaagctaccggtgtcaaattagacgtggcgtatttggagaatctcagccttgaagttgctgcccacatgcgccgcttggaggaagaagtattccgtttagcaggccgttcctttcgccttaactctcgcgatcagttagaacgtgtgttgttcgatgaacttggtctccctcctatcggcaagacagagaagaccggtaaacgtagcacttcagcggcggttttagaagctcttcgcgaagtccatcccattgtggacaagatcttgcagtaccgcgaaatggcgaaattgaaaggcacctatattgaccgtcttccggcattagtccacccgaaaacgggacgcctccatacccgcttcaaccaaacagccacggcgaccggtcgtttgtcctcctctgatccaaaccttcagaatattccagtacgtaccccattgggccagaagatccgccgtgcgtttgtagctgaggagggttggcgtttagtggccctcgattatcgtcaaattgaattacgtgtccttgcccatctttctggcgatgagaacctcatccgcgtgtttcaggaaggcaaagacattcacactcaaacggcaagctggatgtttggattatcagctgaagcgatcgatcctttgatgcgtcgtgcagcgaagaccatcaatttcggtgttctctacggtatgagtgcctttcgtttgtcgcaggaattaggcattccctatgaagaagctcaggcgttcattcagaaatactttcaaagctatcccaaagttaaagcatggatcgagaagactctccgtgaaggccgcacacgtggttacgtagagaccttatttggacgtcgccgctatgttcccgatttaaacgctcgcgtgaaaggcaagcgtgaagccgccgaacgcatggcgttcaacatgcctgtacagggcacggcagctgacctcatgaaacttgcaatggtgcgcctttttccacaattgcgtgaagttggtgcccgcatgctcttgcaggtccacgatgaactcttgttagaagcgccaaaagagcgtgcggaagaggtggcagcctgggcgaaagaagttatggaaggcgtgtggcccttagcggtgcctcttgaagtcgaagttggtattggcgaggattggctggctgccaaagga

SEQ ID NO: 6220 - protein, 841 aa, synthetic construct
  REGION 1..841: note = Variant of DNA polymerase I from Thermus sp. strain 2.9
MHHHHHHGGSGVLPVFEPKGRVLLVDGHHLAYRNFFALKGLTTSLGEPVQGVYGFAKSLLKALKEDGDVVIVVFDAKAPSFRHEAYEAYKAGRAPTPEDFPRQLALMKELVDLLGLERLEVPGFEADDVLATLAKKAEREGYEVQILTADRDLFQLLSPRISVLHPEGHRITPEWLWEKYGLRPEQWVDFRALAGDPSDNIPGVKGIGEKTALKLLKEWGSLENLLKNLDQVKPESVREKILAHLEDLKLSRELSRVRTDLPLEVDFGRRREPDWEGLKAFLERLEFGSLLHEFGLLESPLLAEEAPWPPPEGAFLGYRLSRPEPMWAELLALAASAQGRVYRAEDPHGALRGLFEVRGLLAKDLAVVALREGLDLPPTDDPMLLAYLLDPSNTTPEGVARRYGGEWTEDAAKRALLAERLHENLLGRLQGEERLLWLYEEVEKPLSRVLAHMEATGVKLDVAYLENLSLEVAAHMRRLEEEVFRLAGRSFRLNSRDQLERVLFDELGLPPIGKTEKTGKRSTSAAVLEALREVHPIVDKILQYREMAKLKGTYIDRLPALVHPKTGRLHTRFNQTATATGRLSSSDPNLQNIPVRTPLGQKIRRAFVAEEGWRLVALDYRQIELRVLAHLSGDENLIRVFQEGKDIHTQTASWMFGLSAEAIDPLMRRAAKTINFGVLYGMSAFRLSQELGIPYEEAQAFIQKYFQSYPKVKAWIEKTLREGRTRGYVETLFGRRRYVPDLNARVKGKREAAERMAFNMPVQGTAADLMKLAMVRLFPQLREVGARMLLQVHDELLLEAPKERAEEVAAWAKEVMEGVWPLAVPLEVEVGIGEDWLAAKG

SEQ ID NO: 6221 - DNA, 2523 bp, synthetic construct
  misc_feature 1..2523: note = Variant of DNA polymerase I from Thermus sp. strain 2.9
  source 1..2523: mol_type = other DNA
atgcaccatcatcatcatcatggcggtagcggcgtgttaccggtgttcgagcctaaaggtcgcgtgcttctggttgatggccatcatctcgcgtatcgtaacttctttgccctgaaaggattaaccaccagcctgggcgagccggtacagggtgtctacggctttgcaaagtcgctcctgaaagctctgaaagaagacggtgatgtggtgattgttgtctttgatgcgaaagcgccaagttttcgccacgaagcgtacgaagcttacaaagccgggcgtgctccaacgccggaagactttcctcgccaattggcgcttatgaaggaattagtggatttgcttggcctcgaacgcttggaagttcccggtttcgaggcagacgacgtattagcgactctcgcaaagaaagccgaacgtgagggctatgaagtccagatcttgacagcagatcgcgatcttttccagcttttatctccgcgcatctcggtgttacacccggaagggcatcgtatcaccccggaatggctctgggagaaatatggtttgcgtcccgaacaatgggtggattttcgcgccttagcaggcgatccgagcgacaatattccgggagttaaaggtatcggcgagaagacggcgctcaagctccttaaagaatgggggtcgttggagaacttgcttaagaatttagatcaggtcaaaccagagtcagtgcgtgagaagattcttgctcacctcgaagacctcaaattaagccgcgaattgtcccgtgtacgcaccgatttgccgctcgaagttgatttcggtcgccgccgcgaacctgactgggagggtcttaaagcgtttttagagcgtcttgaatttggttcgctcttgcatgaattcggccttttagaaagcccgttactggccgaagaagcaccttggccaccgcccgagggcgcgtttttaggttaccgtttgagtcgcccggaaccgatgtgggccgaattactggctcttgcagcgtctgcccagggacgtgtgtatcgcgcggaagaccctcatggtgcgctccgcggcctcttcgaagtccgtggactccttgccaaagacttagctgttgttgcattgcgcgaaggtcttgatttacctccgactgatgatccaatgcttcttgcgtacctcttggacccgtcaaacacgacgcccgaaggcccggcccgtcgttacggcggcgagtggaccgaagatgcagcgaaacgcgcgttattggccgaacgtttgcacgaaaatttattaggacgtttgcaaggcgaggaacgtctcctctggctttacgaagaagtggagaaaccattgagtcgcgtgctcgcgcatatggaagctaccggtgtcaaattagacgtggcgtatttggagaatctcagccttgaagttgctgcccacatgcgccgcttggaggaagaagtattccgtttagcaggccgttcctttcgccttaactctcgcgatcagttagaacgtgtgttgttcgatgaacttggtctccctcctatcggcaagacagagaagaccggtaaacgtagcacttcagcggcggttttagaagctcttcgcgaagtccatcccattgtggacaagatcttgcagtaccgcgaaatggcgaaattgaaaggcacctatattgaccgtcttccggcattagtccacccgaaaacgggacgcctccatacccgcttcaaccaaacagccacggcgaccggtcgtttgtcctcctctgatccaaaccttcagaatattccagtacgtaccccattgggccagaagatccgccgtgcgtttgtagctgaggagggttggcgtttagtggccctcgattatcgtcaaattgaattacgtgtccttgcccatctttctggcgatgagaacctcatccgcgtgtttcaggaaggcaaagacattcacactcaaacggcaagctggatgtttggattatcagctgaagcgatcgatcctttgatgcgtcgtgcagcgaagaccatcaatttcggtgttctctacggtatgagtgcctttcgtttgtcgcaggaattaggcattccctatgaagaagctcaggcgttcattcagaaatactttcaaagctatcccaaagttaaagcatggatcgagaagactctccgtgaaggccgcacacgtggttacgtagagaccttatttggacgtcgccgctatgttcccgatttaaacgctcgcgtgaaaggcaagcgtgaagccgccgaacgcatggcgttcaacatgcctgtacagggcacggcagctgacctcatgaaacttgcaatggtgcgcctttttccacaattgcgtgaagttggtgcccgcatgctcttgcaggtccacgatgaactcttgttagaagcgccaaaagagcgtgcggaagaggtggcagccctcgcgaaagaagttatggaaggcgtgtggcccttagcggtgcctcttgaagtcgaagttggtattggcgaggattggctggctgccaaagga

SEQ ID NO: 6222 - protein, 841 aa, synthetic construct
  REGION 1..841: note = Variant of DNA polymerase I from Thermus sp. strain 2.9
MHHHHHHGGSGVLPVFEPKGRVLLVDGHHLAYRNFFALKGLTTSLGEPVQGVYGFAKSLLKALKEDGDVVIVVFDAKAPSFRHEAYEAYKAGRAPTPEDFPRQLALMKELVDLLGLERLEVPGFEADDVLATLAKKAEREGYEVQILTADRDLFQLLSPRISVLHPEGHRITPEWLWEKYGLRPEQWVDFRALAGDPSDNIPGVKGIGEKTALKLLKEWGSLENLLKNLDQVKPESVREKILAHLEDLKLSRELSRVRTDLPLEVDFGRRREPDWEGLKAFLERLEFGSLLHEFGLLESPLLAEEAPWPPPEGAFLGYRLSRPEPMWAELLALAASAQGRVYRAEDPHGALRGLFEVRGLLAKDLAVVALREGLDLPPTDDPMLLAYLLDPSNTTPEGPARRYGGEWTEDAAKRALLAERLHENLLGRLQGEERLLWLYEEVEKPLSRVLAHMEATGVKLDVAYLENLSLEVAAHMRRLEEEVFRLAGRSFRLNSRDQLERVLFDELGLPPIGKTEKTGKRSTSAAVLEALREVHPIVDKILQYREMAKLKGTYIDRLPALVHPKTGRLHTRFNQTATATGRLSSSDPNLQNIPVRTPLGQKIRRAFVAEEGWRLVALDYRQIELRVLAHLSGDENLIRVFQEGKDIHTQTASWMFGLSAEAIDPLMRRAAKTINFGVLYGMSAFRLSQELGIPYEEAQAFIQKYFQSYPKVKAWIEKTLREGRTRGYVETLFGRRRYVPDLNARVKGKREAAERMAFNMPVQGTAADLMKLAMVRLFPQLREVGARMLLQVHDELLLEAPKERAEEVAALAKEVMEGVWPLAVPLEVEVGIGEDWLAAKG

SEQ ID NO: 6223 - DNA, 2523 bp, synthetic construct
  misc_feature 1..2523: note = Variant of DNA polymerase I from Thermus sp. strain 2.9
  source 1..2523: mol_type = other DNA
atgcaccatcatcatcatcatggcggtagcggcgtgttaccggtgttcgagcctaaaggtcgcgtgcttctggttgatggccatcatctcgcgtatcgtaacttctttgccctgaaaggattaaccaccagcctgggcgagccggtacagggtgtctacggctttgcaaagtcgctcctgaaagctctgaaagaagacggtgatgtggtgattgttgtctttgatgcgaaagcgccaagttttcgccacgaagcgtacgaagcttacaaagccgggcgtgctccaacgccggaagactttcctcgccaattggcgcttatgaaggaattagtggatttgcttggcctcgaacgcttggaagttcccggtttcgaggcagacgacgtattagcgactctcgcaaagaaagccgaacgtgagggctatgaagtccagatcttgacagcagatcgcgatcttttccagcttttatctccgcgcatctcggtgttacacccggaagggcatcgtatcaccccggaatggctctgggagaaatatggtttgcgtcccgaacaatgggtggattttcgcgccttagcaggcgatccgagcgacaatattccgggagttaaaggtatcggcgagaagacggcgctcaagctccttaaagaatgggggtcgttggagaacttgcttaagaatttagatcaggtcaaaccagagtcagtgcgtgagaagattcttgctcacctcgaagacctcaaattaagccgcgaattgtcccgtgtacgcaccgatttgccgctcgaagttgatttcggtcgccgccgcgaacctgactgggagggtcttaaagcgtttttagagcgtcttgaatttggttcgctcttgcatgaattcggccttttagaaagcccgttactggccgaagaagcaccttggccaccgcccgagggcgcgtttttaggttaccgtttgagtcgcccggaaccgatgtgggccgaattactggctcttgcagcgtctgcccagggacgtgtgtatcgcgcggaagaccctcatggtgcgctccgcggcctcttcgaagtccgtggactccttgccaaagacttagctgttgttgcattgcgcgaaggtcttgatttacctccgactgatgatccaatgcttcttgcgtacctcttggacccgtcaaacacgacgcccgaaggcgtagcccgtcgttacggcggcgagtggaccgaagatgcagcgaaacgcgcgttattggccgaacgtttgcacgaaaatttattaggacgtttgcaaggcgaggaacgtctcctctggctttacgaagaagtggagaaaccattgagtcgcgtgctcgcgcatatggaagctaccggtgtcaaattagacgtggcgtatttggagaatctcagccttgaagttgctgcccacatgcgccgcttggaggaagaagggttccgtttagcaggccgttcctttcgccttaactctcgcgatcagttagaacgtgtgttgttcgatgaacttggtctccctcctatcggcaagacagagaagaccggtaaacgtagcacttcagcggcggttttagaagctcttcgcgaagtccatcccattgtggacaagatcttgcagtaccgcgaaatggcgaaattgaaaggcacctatattgaccgtcttccggcattagtccacccgaaaacgggacgcctccatacccgcttcaaccaaacagccacggcgaccggtcgtttgtcctcctctgatccaaaccttcagaatattccagtacgtaccccattgggccagaagatccgccgtgcgtttgtagctgaggagggttggcgtttagtggccctcgattatcgtcaaattgaattacgtgtccttgcccatctttctggcgatgagaacctcatccgcgtgtttcaggaaggcaaagacattcacactcaaacggcaagctggatgtttggattatcagctgaagcgatcgatcctttgatgcgtcgtgcagcgaagaccatcaatttcggtgttctctacggtatgagtgcctttcgtttgtcgcaggaattaggcattccctatgaagaagctcaggcgttcattcagaaatactttcaaagctatcccaaagttaaagcatggatcgagaagactctccgtgaaggccgcacacgtggttacgtagagaccttatttggacgtcgccgctatgttcccgatttaaacgctcgcgtgaaaggcaagcgtgaagccgccgaacgcatggcgttcaacatgcctgtacagggcacggcagctgacctcatgaaacttgcaatggtgcgcctttttccacaattgcgtgaagttggtgcccgcatgctcttgcaggtccacgatgaactcttgttagaagcgccaaaagagcgtgcggaagaggtggcagccctcgcgaaagaagttatggaaggcgtgtggcccttagcggtgcctcttgaagtcgaagttggtattggcgaggattggctggctgccaaagga

SEQ ID NO: 6224 - protein, 841 aa, synthetic construct
  REGION 1..841: note = Variant of DNA polymerase I from Thermus sp. strain 2.9
MHHHHHHGGSGVLPVFEPKGRVLLVDGHHLAYRNFFALKGLTTSLGEPVQGVYGFAKSLLKALKEDGDVVIVVFDAKAPSFRHEAYEAYKAGRAPTPEDFPRQLALMKELVDLLGLERLEVPGFEADDVLATLAKKAEREGYEVQILTADRDLFQLLSPRISVLHPEGHRITPEWLWEKYGLRPEQWVDFRALAGDPSDNIPGVKGIGEKTALKLLKEWGSLENLLKNLDQVKPESVREKILAHLEDLKLSRELSRVRTDLPLEVDFGRRREPDWEGLKAFLERLEFGSLLHEFGLLESPLLAEEAPWPPPEGAFLGYRLSRPEPMWAELLALAASAQGRVYRAEDPHGALRGLFEVRGLLAKDLAVVALREGLDLPPTDDPMLLAYLLDPSNTTPEGVARRYGGEWTEDAAKRALLAERLHENLLGRLQGEERLLWLYEEVEKPLSRVLAHMEATGVKLDVAYLENLSLEVAAHMRRLEEEGFRLAGRSFRLNSRDQLERVLFDELGLPPIGKTEKTGKRSTSAAVLEALREVHPIVDKILQYREMAKLKGTYIDRLPALVHPKTGRLHTRFNQTATATGRLSSSDPNLQNIPVRTPLGQKIRRAFVAEEGWRLVALDYRQIELRVLAHLSGDENLIRVFQEGKDIHTQTASWMFGLSAEAIDPLMRRAAKTINFGVLYGMSAFRLSQELGIPYEEAQAFIQKYFQSYPKVKAWIEKTLREGRTRGYVETLFGRRRYVPDLNARVKGKREAAERMAFNMPVQGTAADLMKLAMVRLFPQLREVGARMLLQVHDELLLEAPKERAEEVAALAKEVMEGVWPLAVPLEVEVGIGEDWLAAKG

SEQ ID NO: 6225 - DNA, 2523 bp, synthetic construct
  misc_feature 1..2523: note = Variant of DNA polymerase I from Thermus sp. strain 2.9
  source 1..2523: mol_type = other DNA
atgcaccatcatcatcatcatggcggtagcggcgtgttaccggtgttcgagcctaaaggtcgcgtgcttctggttgatggccatcatctcgcgtatcgtaacttctttgccctgaaaggattaaccaccagcctgggcgagccggtacagggtgtctacggctttgcaaagtcgctcctgaaagctctgaaagaagacggtgatgtggtgattgttgtctttgatgcgaaagcgccaagttttcgccacgaagcgtacgaagcttacaaagccgggcgtgctccaacgccggaagactttcctcgccaattggcgcttatgaaggaattagtggatttgcttggcctcgaacgcttggaagttcccggtttcgaggcagacgacgtattagcgactctcgcaaagaaagccgaacgtgagggctatgaagtccagatcttgacagcagatcgcgatcttttccagcttttatctccgcgcatctcggtgttacacccggaagggcatcgtatcaccccggaatggctctgggagaaatatggtttgcgtcccgaacaatgggtggattttcgcgccttagcaggcgatccgagcgacaatattccgggagttaaaggtatcggcgagaagacggcgctcaagctccttaaagaatgggggtcgttggagaacttgcttaagaatttagatcaggtcaaaccagagtcagtgcgtgagaagattcttgctcacctcgaagacctcaaattaagccgcgaattgtcccgtgtacgcaccgatttgccgctcgaagttgatttcggtcgccgccgcgaacctgactgggagggtcttaaagcgtttttagagcgtcttgaatttggttcgctcttgcatgaattcggccttttagaaagcccgttactggccgaagaagcaccttggccaccgcccgagggcgcgtttttaggttaccgtttgagtcgcccggaaccgatgtgggccgaattactggctcttgcagcgtctgcccagggacgtgtgtatcgcgcggaagaccctcatggtgcgctccgcggcctcttcgaagtccgtggactccttgccaaagacttagctgttgttgcattgcgcgaaccgcttgatttacctccgactgatgatccaatgcttcttgcgtacctcttggacccgtcaaacacgacgcccgaaggcgtagcccgtcgttacggcggcgagtggaccgaagatgcagcgaaacgcgcgttattggccgaacgtttgcacgaaaatttattaggacgtttgcaaggcgaggaacgtctcctctggctttacgaagaagtggagaaaccattgagtcgcgtgctcgcgcatatggaagctaccggtgtcaaattagacgtggcgtatttggagaatctcagccttgaagttgctgcccacatgcgccgcttggaggaagaagtattccgtttagcaggccgttcctttcgccttaactctcgcgatcagttagaacgtgtgttgttcgatgaacttggtctccctcctatcggcaagacagagaagaccggtaaacgtagcacttcagcggcggttttagaagctcttcgcgaagtccatcccattgtggacaagatcttgcagtaccgcgaaatggcgaaattgaaaggcacctatattgaccgtcttccggcattagtccacccgaaaacgggacgcctccatacccgcttcaaccaaacagccacggcgaccggtcgtttgtcctcctctgatccaaaccttcagaatattccagtacgtaccccattgggccagaagatccgccgtgcgtttgtagctgaggagggttggcgtttagtggccctcgattatcgtcaaattgaattacgtgtccttgcccatctttctggcgatgagaacctcatccgcgtgtttcaggaaggcaaagacattcacactcaaacggcaagctggatgtttggattatcagctgaagcgatcgatcctttgatgcgtcgtgcagcgaagaccatcaatttcggtgttctctacggtatgagtgcctttcgtttgtcgcaggaattaggcattccctatgaagaagctcaggcgttcattcagaaatactttcaaagctatcccaaagttaaagcatggatcgagaagactctccgtgaaggccgcacacgtggttacgtagagaccttatttggacgtcgccgctatgttcccgatttaaacgctcgcgtgaaaggcaagcgtgaagccgccgaacgcatggcgttcaacatgcctgtacagggcacggcagctgacctcatgaaacttgcaatggtgcgcctttttccacaattgcgtgaagttggtgcccgcatgctcttgcaggtccacgatgaactcttgttagaagcgccaaaagagcgtgcggaagaggtggcagccctcgcgaaagaagttatggaaggcgtgtggcccttagcggtgcctcttgaagtcgaagttggtattggcgaggattggctggctgccaaagga

SEQ ID NO: 6226 - protein, 841 aa, synthetic construct
  REGION 1..841: note = Variant of DNA polymerase I from Thermus sp. strain 2.9
MHHHHHHGGSGVLPVFEPKGRVLLVDGHHLAYRNFFALKGLTTSLGEPVQGVYGFAKSLLKALKEDGDVVIVVFDAKAPSFRHEAYEAYKAGRAPTPEDFPRQLALMKELVDLLGLERLEVPGFEADDVLATLAKKAEREGYEVQILTADRDLFQLLSPRISVLHPEGHRITPEWLWEKYGLRPEQWVDFRALAGDPSDNIPGVKGIGEKTALKLLKEWGSLENLLKNLDQVKPESVREKILAHLEDLKLSRELSRVRTDLPLEVDFGRRREPDWEGLKAFLERLEFGSLLHEFGLLESPLLAEEAPWPPPEGAFLGYRLSRPEPMWAELLALAASAQGRVYRAEDPHGALRGLFEVRGLLAKDLAVVALREPLDLPPTDDPMLLAYLLDPSNTTPEGVARRYGGEWTEDAAKRALLAERLHENLLGRLQGEERLLWLYEEVEKPLSRVLAHMEATGVKLDVAYLENLSLEVAAHMRRLEEEVFRLAGRSFRLNSRDQLERVLFDELGLPPIGKTEKTGKRSTSAAVLEALREVHPIVDKILQYREMAKLKGTYIDRLPALVHPKTGRLHTRFNQTATATGRLSSSDPNLQNIPVRTPLGQKIRRAFVAEEGWRLVALDYRQIELRVLAHLSGDENLIRVFQEGKDIHTQTASWMFGLSAEAIDPLMRRAAKTINFGVLYGMSAFRLSQELGIPYEEAQAFIQKYFQSYPKVKAWIEKTLREGRTRGYVETLFGRRRYVPDLNARVKGKREAAERMAFNMPVQGTAADLMKLAMVRLFPQLREVGARMLLQVHDELLLEAPKERAEEVAALAKEVMEGVWPLAVPLEVEVGIGEDWLAAKG

SEQ ID NO: 6227 - DNA, 2523 bp, synthetic construct
  misc_feature 1..2523: note = Variant of DNA polymerase I from Thermus sp. strain 2.9
  source 1..2523: mol_type = other DNA
atgcaccatcatcatcatcatggcggtagcggcgtgttaccggtgttcgagcctaaaggtcgcgtgcttctggttgatggccatcatctcgcgtatcgtaacttctttgccctgaaaggattaaccaccagcctgggcgagccggtacagggtgtctacggctttgcaaagtcgctcctgaaagctctgaaagaagacggtgatgtggtgattgttgtctttgatgcgaaagcgccaagttttcgccacgaagcgtacgaagcttacaaagccgggcgtgctccaacgccggaagactttcctcgccaattggcgcttatgaaggaattagtggatttgcttggcctcgaacgcttggaagttcccggtttcgaggcagacgacgtattagcgactctcgcaaagaaagccgaacgtgagggctatgaagtccagatcttgacagcagatcgcgatcttttccagcttttatctccgcgcatctcggtgttacacccggaagggcatcgtatcaccccggaatggctctgggagaaatatggtttgcgtcccgaacaatgggtggattttcgcgccttagcaggcgatccgagcgacaatattccgggagttaaaggtatcggcgagaagacggcgctcaagctccttaaagaatgggggtcgttggagaacttgcttaagaatttagatcaggtcaaaccagagtcagtgcgtgagaagattcttgctcacctcgaagacctcaaattaagccgcgaattgtcccgtgtacgcaccgatttgccgctcgaagttgatttcggtcgccgccgcgaacctgactgggagggtcttaaagcgtttttagagcgtcttgaatttggttcgctcttgcatgaattcggccttttagaaagcccgttactggccgaagaagcaccttggccaccgcccgagggcgcgtttttaggttaccgtttgagtcgcccggaaccgatgtgggccgaattactggctcttgcagcgtctgcccagggacgtgtgtatcgcgcggaagaccctcatggtgcgctccgcggcctcttcgaagtccgtggactccttgccaaagacttagctgttgttgcattgcgcgaaggtcttgatttacctccgactgatgatccaatgcttcttgcgtacctcttggacccgtcaaacacgacgcccgaaggcgtagcccgtcgttacggcggcgagtggaccgaagatgcagcgaaacgcgcgttattggccgaacgtttgcacgaaaatttattaggacgtttgcaaggcgaggaacgtctcctctggctttacgaagaagtggagaaaccattgagtcgcgtgctcgcgcatatggaagctaccggtgtcaaattagacgtggcgtatttggagcatcttcaccttgaagttgctgcccacatgcgccgcttggaggaagaagtattccgtttagcaggccgttcctttcgccttaactctcgcgatcagttagaacgtgtgttgttcgatgaacttggtctccctcctatcggcaagacagagaagaccggtaaacgtagcacttcagcggcggttttagaagctcttcgcgaagtccatcccattgtggacaagatcttgcagtaccgcgaaatggcgaaattgaaaggcacctatattgaccgtcttccggcattagtccacccgaaaacgggacgcctccatacccgcttcaaccaaacagccacggcgaccggtcgtttgtcctcctctgatccaaaccttcagaatattccagtacgtaccccattgggccagaagatccgccgtgcgtttgtagctgaggagggttggcgtttagtggccctcgattatcgtcaaattgaattacgtgtccttgcccatctttctggcgatgagaacctcatccgcgtgtttcaggaaggcaaagacattcacactcaaacggcaagctggatgtttggattatcagctgaagcgatcgatcctttgatgcgtcgtgcagcgaagaccatcaatttcggtgttctctacggtatgagtgcctttcgtttgtcgcaggaattaggcattccctatgaagaagctcaggcgttcattcagaaatactttcaaagctatcccaaagttaaagcatggatcgagaagactctccgtgaaggccgcacacgtggttacgtagagaccttatttggacgtcgccgctatgttcccgatttaaacgctcgcgtgaaaggcaagcgtgaagccgccgaacgcatggcgttcaacatgcctgtacagggcacggcagctgacctcatgaaacttgcaatggtgcgcctttttccacaattgcgtgaagttggtgcccgcatgctcttgcaggtccacgatgaactcttgttagaagcgccaaaagagcgtgcggaagaggtggcagccctcgcgaaagaagttatggaaggcgtgtggcccttagcggtgcctcttgaagtcgaagttggtattggcgaggattggctggctgccaaagga

SEQ ID NO: 6228 - protein, 841 aa, synthetic construct
  REGION 1..841: note = Variant of DNA polymerase I from Thermus sp. strain 2.9
MHHHHHHGGSGVLPVFEPKGRVLLVDGHHLAYRNFFALKGLTTSLGEPVQGVYGFAKSLLKALKEDGDVVIVVFDAKAPSFRHEAYEAYKAGRAPTPEDFPRQLALMKELVDLLGLERLEVPGFEADDVLATLAKKAEREGYEVQILTADRDLFQLLSPRISVLHPEGHRITPEWLWEKYGLRPEQWVDFRALAGDPSDNIPGVKGIGEKTALKLLKEWGSLENLLKNLDQVKPESVREKILAHLEDLKLSRELSRVRTDLPLEVDFGRRREPDWEGLKAFLERLEFGSLLHEFGLLESPLLAEEAPWPPPEGAFLGYRLSRPEPMWAELLALAASAQGRVYRAEDPHGALRGLFEVRGLLAKDLAVVALREGLDLPPTDDPMLLAYLLDPSNTTPEGVARRYGGEWTEDAAKRALLAERLHENLLGRLQGEERLLWLYEEVEKPLSRVLAHMEATGVKLDVAYLEHLHLEVAAHMRRLEEEVFRLAGRSFRLNSRDQLERVLFDELGLPPIGKTEKTGKRSTSAAVLEALREVHPIVDKILQYREMAKLKGTYIDRLPALVHPKTGRLHTRFNQTATATGRLSSSDPNLQNIPVRTPLGQKIRRAFVAEEGWRLVALDYRQIELRVLAHLSGDENLIRVFQEGKDIHTQTASWMFGLSAEAIDPLMRRAAKTINFGVLYGMSAFRLSQELGIPYEEAQAFIQKYFQSYPKVKAWIEKTLREGRTRGYVETLFGRRRYVPDLNARVKGKREAAERMAFNMPVQGTAADLMKLAMVRLFPQLREVGARMLLQVHDELLLEAPKERAEEVAALAKEVMEGVWPLAVPLEVEVGIGEDWLAAKG

SEQ ID NO: 6229 - DNA, 2523 bp, synthetic construct
  misc_feature 1..2523: note = Variant of DNA polymerase I from Thermus sp. strain 2.9
  source 1..2523: mol_type = other DNA
atgcaccatcatcatcatcatggcggtagcggcgtgttaccggtgttcgagcctaaaggtcgcgtgcttctggttgatggccatcatctcgcgtatcgtaacttctttgccctgaaaggattaaccaccagcctgggcgagccggtacagggtgtctacggctttgcaaagtcgctcctgaaagctctgaaagaagacggtgatgtggtgattgttgtctttgatgcgaaagcgccaagttttcgccacgaagcgtacgaagcttacaaagccgggcgtgctccaacgccggaagactttcctcgccaattggcgcttatgaaggaattagtggatttgcttggcctcgaacgcttggaagttcccggtttcgaggcagacgacgtattagcgactctcgcaaagaaagccgaacgtgagggctatgaagtccagatcttgacagcagatcgcgatcttttccagcttttatctccgcgcatctcggtgttacacccggaagggcatcgtatcaccccggaatggctctgggagaaatatggtttgcgtcccgaacaatgggtggattttcgcgccttagcaggcgatccgagcgacaatattccgggagttaaaggtatcggcgagaagacggcgctcaagctccttaaagaatgggggtcgttggagaacttgcttaagaatttagatcaggtcaaaccagagtcagtgcgtgagaagattcttgctcacctcgaagacctcaaattaagccgcgaattgtcccgtgtacgcaccgatttgccgctcgaagttgatttcggtcgccgccgcgaacctgactgggagggtcttaaagcgtttttagagcgtcttgaatttggttcgctcttgcatgaattcggccttttagaaagcccgttactggccgaagaagcaccttggccaccgcccgagggcgcgtttttaggttaccgtttgagtcgcccggaaccgatgtgggccgaattactggctcttgcagcgtctgcccagggacgtgtgtatcgcgcggaagaccctcatggtgcgctccgcggcctcttcgaagtccgtggactccttgccaaagacttagctgttgttgcattgcgcgaaggtcttgatttacctccgactgatgatccaatgcttcttgcgtacctcttggacccgtcaaacacgacgcccgaaggcgtagcccgtcgttacggcggcgagtggaccgaagatgcagcgaaacgcgcgttattggccgaacgtttgcacgaaaatttattaggacgtttgcaaggcgaggaacgtctcctctggctttacgaagaagtggagaaaccattgagtcgcgtgctcgcgcatatggaagctaccggtgtcaaattagacgtggcgtatttggagaatctcagccttgaagttgctgcccacatgcgccgcttggaggaagaagtattccgtttagcaggccgttcctttcgccttaactctcgcgatcagttagaacgtgtgttgttcgatgaacttggtctccctcctatcggcaagacagagaagaccggtaaacgtagcacttcagcggcggttttagaagctcttcgcgaagtccatcccattgtggacaagatcttgcagtaccgcgaaatggcgaaattgaaaggcacctatattgaccgtcttccggcattagtccacccgaaaacgggacgcctccatacccgcttcaaccaaacagccacggcgaccggtcgtttgtcctcctctgatccaaaccttcagaatattccagtacgtaccccattgggccagaagatccgccgtgcgtttgtagctgaggagggttggcgtttagtggccctcgattatcgtcaaattgaattacgtgtccttgcccatctttctggcgatgagaacctcatccgcgtgtttcaggaaggcaaagacattcacactcaaacggcaagctggatgtttggattatcagctgaagcgatcgatcctttgatgcgtcgtgcagcgaagaccatcaatttcggtgttctctacggtatgagtgcctttcgtttgtcgcaggaattaggcattccctatgaagaagctcaggcgttcattcagaaatactttcaaagctatcccaaagttaaagcatggatcgagaagactctccgtgaaggccgcacacgtggttacgtagagaccttatttggacgtcgccgctatgttcccgatttaaacgctcgcgtgaaaggcaagcgtgaagccgccgaacgcatggcgttcaacatgcctgtacagggcacggcagctgacctcatgaaacttgcaatggtgcgcctttttccacaattgcgtgaagttggtgcccgcatgctcttgcaggtccacgatgaactcttgttagaagcgccaaaagagcgtgcggaagaggtggcagccctcgcgaaagaagttatggaaggcgtgtgggatttagcggtgcctcttgaagtcgaagttggtattggcgaggattggctggctgccaaagga

SEQ ID NO: 6230 - protein, 841 aa, synthetic construct
  REGION 1..841: note = Variant of DNA polymerase I from Thermus sp. strain 2.9
MHHHHHHGGSGVLPVFEPKGRVLLVDGHHLAYRNFFALKGLTTSLGEPVQGVYGFAKSLLKALKEDGDVVIVVFDAKAPSFRHEAYEAYKAGRAPTPEDFPRQLALMKELVDLLGLERLEVPGFEADDVLATLAKKAEREGYEVQILTADRDLFQLLSPRISVLHPEGHRITPEWLWEKYGLRPEQWVDFRALAGDPSDNIPGVKGIGEKTALKLLKEWGSLENLLKNLDQVKPESVREKILAHLEDLKLSRELSRVRTDLPLEVDFGRRREPDWEGLKAFLERLEFGSLLHEFGLLESPLLAEEAPWPPPEGAFLGYRLSRPEPMWAELLALAASAQGRVYRAEDPHGALRGLFEVRGLLAKDLAVVALREGLDLPPTDDPMLLAYLLDPSNTTPEGVARRYGGEWTEDAAKRALLAERLHENLLGRLQGEERLLWLYEEVEKPLSRVLAHMEATGVKLDVAYLENLSLEVAAHMRRLEEEVFRLAGRSFRLNSRDQLERVLFDELGLPPIGKTEKTGKRSTSAAVLEALREVHPIVDKILQYREMAKLKGTYIDRLPALVHPKTGRLHTRFNQTATATGRLSSSDPNLQNIPVRTPLGQKIRRAFVAEEGWRLVALDYRQIELRVLAHLSGDENLIRVFQEGKDIHTQTASWMFGLSAEAIDPLMRRAAKTINFGVLYGMSAFRLSQELGIPYEEAQAFIQKYFQSYPKVKAWIEKTLREGRTRGYVETLFGRRRYVPDLNARVKGKREAAERMAFNMPVQGTAADLMKLAMVRLFPQLREVGARMLLQVHDELLLEAPKERAEEVAALAKEVMEGVWDLAVPLEVEVGIGEDWLAAKG

SEQ ID NO: 6231 - DNA, 2523 bp, synthetic construct
  misc_feature 1..2523: note = Variant of DNA polymerase I from Thermus sp. strain 2.9
  source 1..2523: mol_type = other DNA
atgcaccatcatcatcatcatggcggtagcggcgtgttaccggtgttcgagcctaaaggtcgcgtgcttctggttgatggccatcatctcgcgtatcgtaacttctttgccctgaaaggattaaccaccagccgcggcgagccggtacagggtgtctacggctttgcaaagtcgctcctgaaagctctgaaagaagacggtgatgtggtgattgttgtctttgatgcgaaagcgccaagttttcgccacgaagcgtacgaagcttacaaagccgggcgtgctccaacgccggaagactttcctcgccaattggcgcttatgaaggaattagtggatttgcttggcctcgaacgcttggaagttcccggtttcgaggcagacgacgtattagcgactctcgcaaagaaagccgaacgtgagggctatgaagtccagatcttgacagcagatcgcgatcttttccagcttttatctccgcgcatctcggtgttacacccggaagggcatcgtatcaccccggaatggctctgggagaaatatggtttgcgtcccgaacaatgggtggattttcgcgccttagcaggcgatccgagcgacaatattccgggagttaaaggtatcggcgagaagacggcgctcaagctccttaaagaatgggggtcgttggagaacttgcttaagaatttagatcaggtcaaaccagagtcagtgcgtgagaagattcttgctcacctcgaagacctcaaattaagccgcgaattgtcccgtgtacgcaccgatttgccgctcgaagttgatttccgccgccgccgcgaacctgactgggagggtcttaaagcgtttttagagcgtcttgaatttggttcgctcttgcatgaattcggccttttagaaagcccgttactggccgaagaagcaccttggccaccgcccgagggcgcgtttttaggttaccgtttgagtcgcccggaaccgatgtgggccgaattactggctcttgcagcgtctgcccagggacgtgtgtatcgcgcggaagaccctcatggtgcgctccgcggcctcttcgaagtccgtggactccttgccaaagacttagctgttgttgcattgcgcgaaggtcttgatttacctccgactgatgatccaatgcttcttgcgtacctcttggacccgtcaaacacgacgcccgaaggcgtagcccgtcgttacggcggcgagtggaccgaagatgcagcgaaacgcgcgttattggccgaacgtttgcacgcaaatttattaggacgtttgcaaggcgaggaacgtctcctctggctttacgaagaagtggagaaaccattgagtcgcgtgctcgcgcatatggaagctaccggtgtcaaattagacgtggcgtatttggaggcccttagccttgaagttgctgcccacatgcgccgcttggaggaagaagtattccgtttagcaggccgttcctttcgccttaactctcgcgatcagttagaacgtgtgttgttcgatgaacttggtctccctcctatcggcaagacagagaagaccggtaaacgtagcacttcagcggcggttttagaagctcttcgcgaagtccatcccattgtggacaagatcttgcagtaccgcgaaatggcgaaattgaaaggcacctatattgaccgtcttccggcattagtccacccgaaaacgggacgcctccatacccgcttcaaccaaacagccacggcgaccggtcgtttgtccagttctgatccaaaccttcagaatattccagtacgtaccccattgggccagaagatccgccgtgcgtttgtagctgaggagggttggcgtttagtggccctcgattatcgtcaaattgaattacgtgtccttgcccatctttctggcgatgagaacctcatccgcgtgtttcaggaaggcaaagacattcacactcaaacggcaagctggatgtttggattatcagctgaagcgatcgatcctttgatgcgtcgtgcagcgaagaccatcaatttcggtgttctctacggtatgagtgcctttcgtttgtcgcaggaattaggcattccctatgaagaagctcaggcgttcattcagaaatactttcaaagctatcccaaagttaaagcatggatcgagaagactctccgcgaaggccgcacacgtggttacgtagagaccttatttggacgtcgccgctatgttcccgatttaaacgctcgcgtgaaaagcaaacgtgaagccgccgaacgcatggcgttcaacatgcctgtacagggcacggcagctgacctcatgaaacttgcaatggtgcgcctttttccacaattgcgtgaagttggtgcccgcatgctcttgcaggtccacgatgaactcttgttagaagcgccaaaagagcgtgcggaagaggtggcagccctcgcgaaagaagttatggaaggcgtgtggcccttagcggtgcctcttgaagtcgaagttggtattggcgaggattggctggctgccaaagga

SEQ ID NO: 6232 - protein, 841 aa, synthetic construct
  REGION 1..841: note = Variant of DNA polymerase I from Thermus sp. strain 2.9
MHHHHHHGGSGVLPVFEPKGRVLLVDGHHLAYRNFFALKGLTTSRGEPVQGVYGFAKSLLKALKEDGDVVIVVFDAKAPSFRHEAYEAYKAGRAPTPEDFPRQLALMKELVDLLGLERLEVPGFEADDVLATLAKKAEREGYEVQILTADRDLFQLLSPRISVLHPEGHRITPEWLWEKYGLRPEQWVDFRALAGDPSDNIPGVKGIGEKTALKLLKEWGSLENLLKNLDQVKPESVREKILAHLEDLKLSRELSRVRTDLPLEVDFRRRREPDWEGLKAFLERLEFGSLLHEFGLLESPLLAEEAPWPPPEGAFLGYRLSRPEPMWAELLALAASAQGRVYRAEDPHGALRGLFEVRGLLAKDLAVVALREGLDLPPTDDPMLLAYLLDPSNTTPEGVARRYGGEWTEDAAKRALLAERLHANLLGRLQGEERLLWLYEEVEKPLSRVLAHMEATGVKLDVAYLEALSLEVAAHMRRLEEEVFRLAGRSFRLNSRDQLERVLFDELGLPPIGKTEKTGKRSTSAAVLEALREVHPIVDKILQYREMAKLKGTYIDRLPALVHPKTGRLHTRFNQTATATGRLSSSDPNLQNIPVRTPLGQKIRRAFVAEEGWRLVALDYRQIELRVLAHLSGDENLIRVFQEGKDIHTQTASWMFGLSAEAIDPLMRRAAKTINFGVLYGMSAFRLSQELGIPYEEAQAFIQKYFQSYPKVKAWIEKTLREGRTRGYVETLFGRRRYVPDLNARVKSKREAAERMAFNMPVQGTAADLMKLAMVRLFPQLREVGARMLLQVHDELLLEAPKERAEEVAALAKEVMEGVWPLAVPLEVEVGIGEDWLAAKG

SEQ ID NO: 6233 - DNA, 2523 bp, synthetic construct
  misc_feature 1..2523: note = Variant of DNA polymerase I from Thermus sp. strain 2.9
  source 1..2523: mol_type = other DNA
atgcaccatcatcatcatcatggcggtagcggcgtgttaccggtgttcgagcctaaaggtcgcgtgcttctggttgatggccatcatctcgcgtatcgtaacttctttgccctgaaaggattaaccaccagcctgggcgagccggtacagggtgtctacggctttgcaaagtcgctcctgaaagctctgaaagaagacggtgatgtggtgattgttgtctttgatgcgaaagcgccaagttttcgccacgaagcgtacgaagcttacaaagccgggcgtgctccaacgccggaagactttcctcgccaattggcgcttatgaaggaattagtggatttgcttggcctcgaacgcttggaagttcccggtttcgaggcagacgacgtattagcgactctcgcaaagaaagccgaacgtgagggctatgaagtccagatcttgacagcagatcgcgatcttttccagcttttatctccgcgcatctcggtgttacacccggaagggcatcgtatcaccccggaatggctctgggagaaatatggtttgcgtcccgaacaatgggtggattttcgcgccttagcaggcgatccgagcgacaatattccgggagttaaaggtatcggcgagaagacggcgctcaagctccttaaagaatgggggtcgttggagaacttgcttaagaatttagatcaggtcaaaccagagtcagtgcgtgagaagattcttgctcacctcgaagacctcaaattaagccgcgaattgtcccgtgtacgcaccgatttgccgctcgaagttgatttcggtcgccgccgcgaacctgactgggagggtcttaaagcgtttttagagcgtcttgaatttggttcgctcttgcatgaattcggccttttagaaagcccgttactggccgaagaagcaccttggccaccgcccgagggcgcgtttttaggttaccgtttgagtcgcccggaaccgatgtgggccgaattactggctcttgcagcgtctgcccagggacgtgtgtatcgcgcggaagaccctcatggtgcgctccgcggcctcttcgaagtccgtggactccttgccaaagacttagctgttgttgcattgcgcgaaggtcttgatttacctccgactgatgatccaatgcttcttgcgtacctcttggacccgtcaaacacgacgcccgaaggcgtagcccgtcgttacggcggcgagtggaccgaagatgcagcgaaacgcgcgttattggccgaacgtttgcacgaaaatttattaggacgtttgcaaggcgaggaacgtctcctctggctttacgaagaagtggagaaaccattgagtcgcgtgctcgcgcatatggaagctaccggtgtcaaattagacgtggcgtatttggagaatctcagccttgaagttgctgcccacatgcgccgcttggaggaagaagtattccgtttagcaggccgttcctttcgccttaactctcgcgatcagttagaacgtgtgttgttcgatgaacttggtctccctcctatcggcaagacagagaagaccggtaaacgtagcacttcagcggcggttttagaagctcttcgcgaagtccatcccattgtggacaagatcttgcagtaccgcgaaatggcgaaattgaaaggcacctatattgaccgtcttccggcattagtccacccgaaaacgggacgcctccatacccgcttcaaccaaacagccacggcgaccggtcgtttgtcctcctctgatccaaaccttcagaatattccagtacgtaccccattgggccagaagatccgccgtgcgtttgtagctgaggagggttggcgtttagtggccctcgattatcgtcaaattgaattacgtgtccttgcccatctttctggcgatgagaacctcatccgcgtgtttcaggaaggcaaagacattcacactcaaacggcaagctggatgtttggattatcagctgaagcgatcgatcctttgatgcgtcgtgcagcgaagaccatcaatttcggtgttctctacggtatgagtgcctttcgtttgtcgcaggaattaggcattccctatgaagaagctcaggcgttcattcagaaatactttcaaagctatcccaaagttaaagcatggatcgagaagactctccgtgaaggccgcacacgtggttacgtagagaccttatttggacgtcgccgctatgttcccgatttaaacgctcgcgtgaaaagcgtacgtgaagccgccgaacgcatggcgttcaacatgcctgtacagggcacggcagctgacctcatgaaacttgcaatggtgcgcctttttccacaattgcgtgaagttggtgcccgcatgctcttgcaggtccacgatgaactcttgttagaagcgccaaaagagcgtgcggaagaggtggcagccctcgcgaaagaagttatggaaggcgtgtggcccttagcggtgcctcttgaagtcgaagttggtattggcgaggattggctggctgccaaagga

SEQ ID NO: 6234 - protein, 841 aa, synthetic construct
  REGION 1..841: note = Variant of DNA polymerase I from Thermus sp. strain 2.9
MHHHHHHGGSGVLPVFEPKGRVLLVDGHHLAYRNFFALKGLTTSLGEPVQGVYGFAKSLLKALKEDGDVVIVVFDAKAPSFRHEAYEAYKAGRAPTPEDFPRQLALMKELVDLLGLERLEVPGFEADDVLATLAKKAEREGYEVQILTADRDLFQLLSPRISVLHPEGHRITPEWLWEKYGLRPEQWVDFRALAGDPSDNIPGVKGIGEKTALKLLKEWGSLENLLKNLDQVKPESVREKILAHLEDLKLSRELSRVRTDLPLEVDFGRRREPDWEGLKAFLERLEFGSLLHEFGLLESPLLAEEAPWPPPEGAFLGYRLSRPEPMWAELLALAASAQGRVYRAEDPHGALRGLFEVRGLLAKDLAVVALREGLDLPPTDDPMLLAYLLDPSNTTPEGVARRYGGEWTEDAAKRALLAERLHENLLGRLQGEERLLWLYEEVEKPLSRVLAHMEATGVKLDVAYLENLSLEVAAHMRRLEEEVFRLAGRSFRLNSRDQLERVLFDELGLPPIGKTEKTGKRSTSAAVLEALREVHPIVDKILQYREMAKLKGTYIDRLPALVHPKTGRLHTRFNQTATATGRLSSSDPNLQNIPVRTPLGQKIRRAFVAEEGWRLVALDYRQIELRVLAHLSGDENLIRVFQEGKDIHTQTASWMFGLSAEAIDPLMRRAAKTINFGVLYGMSAFRLSQELGIPYEEAQAFIQKYFQSYPKVKAWIEKTLREGRTRGYVETLFGRRRYVPDLNARVKSVREAAERMAFNMPVQGTAADLMKLAMVRLFPQLREVGARMLLQVHDELLLEAPKERAEEVAALAKEVMEGVWPLAVPLEVEVGIGEDWLAAKG

SEQ ID NO: 6235 - DNA, 2523 bp, synthetic construct
  misc_feature 1..2523: note = Variant of DNA polymerase I from Thermus sp. strain 2.9
  source 1..2523: mol_type = other DNA
atgcaccatcatcatcatcatggcggtagcggcgtgttaccggtgttcgagcctaaaggtcgcgtgcttctggttgatggccatcatctcgcgtatcgtaacttctttgccctgaaaggattaaccaccagcctgggcgagccggtacagggtgtctacggctttgcaaagtcgctcctgaaagctctgaaagaagacggtgatgtggtgattgttgtctttgatgcgaaagcgccaagttttcgccacgaagcgtacgaagcttacaaagccgggcgtgctccaacgccggaagactttcctcgccaattggcgcttatgaaggaattagtggatttgcttggcctcgaacgcttggaagttcccggtttcgaggcagacgacgtattagcgactctcgcaaagaaagccgaacgtgagggctatgaagtccagatcttgacagcagatcgcgatcttttccagcttttatctccgcgcatctcggtgttacacccggaagggcatcgtatcaccccggaatggctctgggagaaatatggtttgcgtcccgaacaatgggtggattttcgcgccttagcaggcgatccgagcgacaatattccgggagttaaaggtatcggcgagaagacggcgctcaagctccttaaagaatgggggtcgttggagaacttgcttaagaatttagatcaggtcaaaccagagtcagtgcgtgagaagattcttgctcacctcgaagacctcaaattaagccgcgaattgtcccgtgtacgcaccgatttgccgctcgaagttgatttcggtcgccgccgcgaacctgactgggagggtcttaaagcgtttttagagcgtcttgaatttggttcgctcttgcatgaattcggccttttagaaagcccgttactggccgaagaagcaccttggccaccgcccgagggcgcgtttttaggttaccgtttgagtcgcccggaaccgatgtgggccgaattactggctcttgcagcgtctgcccagggacgtgtgtatcgcgcggaagaccctcatggtgcgctccgcggcctcttcgaagtccgtggactccttgccaaagacttagctgttgttgcattgcgcgaaggtcttgatttacctccgactgatgatccaatgcttcttgcgtacctcttggacccgtcaaacacgacgcccgaaggcgtagcccgtcgttacggcggcgagtggaccgaagatgcagcgaaacgcgcgttattggccgaacgtttgcacgaaaatttattaggacgtttgcaaggcgaggaacgtctcctctggctttacgaagaagtggagaaaccattgagtcgcgtgctcgcgcatatggaagctaccggtgtcaaattagacgtggcgtatttggagaatctcagccttgaagttgctgcccacatgcgccgcttggaggaagaagtattccgtttagcaggccgttcctttcgccttaactctcgcgatcagttagaacgtgtgttgttcgatcgtcttggtctccctcctatcggcaagacagagaagaccggtaaacgtagcacttcagcggcggttttagaagctcttcgcgaagtccatcccattgtggacaagatcttgcagtaccgcgaaatggcgaaattgaaaggcacctatattgaccgtcttccggcattagtccacccgaaaacgggacgcctccatacccgcttcaaccaaacagccacggcgaccggtcgtttgtcctcctctgatccaaaccttcagaatattccagtacgtaccccattgggccagaagatccgccgtgcgtttgtagctgaggagggttggcgtttagtggccctcgattatcgtcaaattgaattacgtgtccttgcccatctttctggcgatgagaacctcatccgcgtgtttcaggaaggcaaagacattcacactcaaacggcaagctggatgtttggattatcagctgaagcgatcgatcctttgatgcgtcgtgcagcgaagaccatcaatttcggtgttctctacggtatgagtgcctttcgtttgtcgcaggaattaggcattccctatgaagaagctcaggcgttcattcagaaatactttcaaagctatcccaaagttaaagcatggatcgagaagactctccgtgaaggccgcacacgtggttacgtagagaccttatttggacgtcgccgctatgttcccgatttaaacgctcgcgtgaaaggcaagcgtgaagccgccgaacgcatggcgttcaacatgcctgtacagggcacggcagctgacctcatgaaacttgcaatggtgcgcctttttccacaattgcgtgaagttggtgcccgcatgctcttgcaggtccacgatgaactcttgttagaagcgccaaaagagcgtgcggaagaggtggcagccctcgcgaaagaagttatggaaggcgtgtggcccttagcggtgcctcttgaagtcgaagttggtattggcgaggattggctggctgccaaagga

SEQ ID NO: 6236 - protein, 841 aa, synthetic construct
  REGION 1..841: note = Variant of DNA polymerase I from Thermus sp. strain 2.9
MHHHHHHGGSGVLPVFEPKGRVLLVDGHHLAYRNFFALKGLTTSLGEPVQGVYGFAKSLLKALKEDGDVVIVVFDAKAPSFRHEAYEAYKAGRAPTPEDFPRQLALMKELVDLLGLERLEVPGFEADDVLATLAKKAEREGYEVQILTADRDLFQLLSPRISVLHPEGHRITPEWLWEKYGLRPEQWVDFRALAGDPSDNIPGVKGIGEKTALKLLKEWGSLENLLKNLDQVKPESVREKILAHLEDLKLSRELSRVRTDLPLEVDFGRRREPDWEGLKAFLERLEFGSLLHEFGLLESPLLAEEAPWPPPEGAFLGYRLSRPEPMWAELLALAASAQGRVYRAEDPHGALRGLFEVRGLLAKDLAVVALREGLDLPPTDDPMLLAYLLDPSNTTPEGVARRYGGEWTEDAAKRALLAERLHENLLGRLQGEERLLWLYEEVEKPLSRVLAHMEATGVKLDVAYLENLSLEVAAHMRRLEEEVFRLAGRSFRLNSRDQLERVLFDRLGLPPIGKTEKTGKRSTSAAVLEALREVHPIVDKILQYREMAKLKGTYIDRLPALVHPKTGRLHTRFNQTATATGRLSSSDPNLQNIPVRTPLGQKIRRAFVAEEGWRLVALDYRQIELRVLAHLSGDENLIRVFQEGKDIHTQTASWMFGLSAEAIDPLMRRAAKTINFGVLYGMSAFRLSQELGIPYEEAQAFIQKYFQSYPKVKAWIEKTLREGRTRGYVETLFGRRRYVPDLNARVKGKREAAERMAFNMPVQGTAADLMKLAMVRLFPQLREVGARMLLQVHDELLLEAPKERAEEVAALAKEVMEGVWPLAVPLEVEVGIGEDWLAAKG

SEQ ID NO: 6237 - DNA, 2523 bp, synthetic construct
  misc_feature 1..2523: note = Variant of DNA polymerase I from Thermus sp. strain 2.9
  source 1..2523: mol_type = other DNA
atgcaccatcatcatcatcatggcggtagcggcgtgttaccggtgttcgagcctaaaggtcgcgtgcttctggttgatggccatcatctcgcgtatcgtaacttctttgccctgaaaggattaaccaccagcctgggcgagccggtacagggtgtctacggctttgcaaagtcgctcctgaaagctctgaaagaagacggtgatgtggtgattgttgtctttgatgcgaaagcgccaagttttcgccacgaagcgtacgaagcttacaaagccgggcgtgctccaacgccggaagactttcctcgccaattggcgcttatgaaggaattagtggatttgcttggcctcgaacgcttggaagttcccggtttcgaggcagacgacgtattagcgactctcgcaaagaaagccgaacgtgagggctatgaagtccagatcttgacagcagatcgcgatcttttccagcttttatctccgcgcatctcggtgttacacccggaagggcatcgtatcaccccggaatggctctgggagaaatatggtttgcgtcccgaacaatgggtggattttcgcgccttagcaggcgatccgagcgacaatattccgggagttaaaggtatcggcgagaagacggcgctcaagctccttaaagaatgggggtcgttggagaacttgcttaagaatttagatcaggtcaaaccagagtcagtgcgtgagaagattcttgctcacctcgaagacctcaaattaagccgcgaattgtcccgtgtacgcaccgatttgccgctcgaagttgatttcggccgccgccgcgaacctgactgggagggtcttaaagcgtttttagagcgtcttgaatttggttcgctcttgcatgaattcggccttttagaaagcccgttaccggccgaagaagcaccttggccaccgcccgagggcgcgtttttaggttaccgtttgagtcgcccggaaccgatgtgggccgaattactggctcttgcagcgtctgcccagggacgtgtgtatcgcgcggaagaccctcatggtgcgctccgcggcctcttcgaagtccgtggactccttgccaaagacttagctgttgttgcattgcgcgaaggtcttgatttacctccgactgatgatccaatgcttcttgcgtacctcttggacccgtcaaacacgacgcccgaaggcgtagcccgtcgttacggcggcgagtggaccgaagatgcagcgaaacgcgcgttattggccgaacgtttgcacgaaaatttattaggacgtttgcaaggcgaggaacgtctcctctggctttacgaagaagtggagaaaccattgagtcgcgtgctcgcgcatatggaagctaccggtgtcaaattagacgtggcgtatttggagaatcttcaccttgaagttgctgcccacatgcgccgcttggaggaagaagtattccgtttagcaggccgctcctttcgccttaactctcgcgatcagttagaacgtgtgttgttcgatgaacttggtctccctcctatcggcaagacagagaagaccggtaaacgtagcacttcagcggcggttttagaagctcttcgcgaagtccatcccattgtggacaagatcttgcagtaccgcgaaatggcgaaattgaaaggcacctatattgaccgtcttccggcattagtccacccgaaaacgggacgcctccatacccgcttcaaccaaacagccacggcgaccggtcgtttgtcctcctctgatccaaaccttcagaatattccagtacgtaccccattgggccagaagatccgccgtgcgtttgtagctgaggagggttggcgtttagtggccctcgattatcgtcaaattgaattacgtgtccttgcccatctttctggcgatgagaacctcatccgcgtgtttcaggaaggcaaagacattcacactcaaacggcaagctggatgtttggattatcagctgaagcgatcgatcctttgatgcgtcgtgcagcgaagaccatcaatttcggtgttctctacggtatgagtgcctttcgtttgtcgcaggaattaggcattccctatgaagaagctcaggcgttcattcagaaatactttcaaagctatcccaaagttaaagcatggatcgagaagactctccgtgaaggccgcacacgtggttacgtagagaccttatttggacgtcgccgctatgttcccgatttaaacgctcgcgtgaaaggcaagcgtgaagccgccgaacgcatggcgttcaacatgcctgtacagggcacggcagctgacctcatgaaacttgcaatggtgcgcctttttccacaattgcgtgaagttggtgcccgcatgctcttgcaggtccacgatgaactcttgttagaagcgccaaaagagcgtgcggaagaggtggcagccctcgcgaaagaagttatggaaggcgtgtggcccttagcggtgcctcttgaagtcgaagttggtattggcgaggattggctggctgccaaagga

SEQ ID NO: 6238 - protein, 841 aa, synthetic construct
  REGION 1..841: note = Variant of DNA polymerase I from Thermus sp. strain 2.9
MHHHHHHGGSGVLPVFEPKGRVLLVDGHHLAYRNFFALKGLTTSLGEPVQGVYGFAKSLLKALKEDGDVVIVVFDAKAPSFRHEAYEAYKAGRAPTPEDFPRQLALMKELVDLLGLERLEVPGFEADDVLATLAKKAEREGYEVQILTADRDLFQLLSPRISVLHPEGHRITPEWLWEKYGLRPEQWVDFRALAGDPSDNIPGVKGIGEKTALKLLKEWGSLENLLKNLDQVKPESVREKILAHLEDLKLSRELSRVRTDLPLEVDFGRRREPDWEGLKAFLERLEFGSLLHEFGLLESPLPAEEAPWPPPEGAFLGYRLSRPEPMWAELLALAASAQGRVYRAEDPHGALRGLFEVRGLLAKDLAVVALREGLDLPPTDDPMLLAYLLDPSNTTPEGVARRYGGEWTEDAAKRALLAERLHENLLGRLQGEERLLWLYEEVEKPLSRVLAHMEATGVKLDVAYLENLHLEVAAHMRRLEEEVFRLAGRSFRLNSRDQLERVLFDELGLPPIGKTEKTGKRSTSAAVLEALREVHPIVDKILQYREMAKLKGTYIDRLPALVHPKTGRLHTRFNQTATATGRLSSSDPNLQNIPVRTPLGQKIRRAFVAEEGWRLVALDYRQIELRVLAHLSGDENLIRVFQEGKDIHTQTASWMFGLSAEAIDPLMRRAAKTINFGVLYGMSAFRLSQELGIPYEEAQAFIQKYFQSYPKVKAWIEKTLREGRTRGYVETLFGRRRYVPDLNARVKGKREAAERMAFNMPVQGTAADLMKLAMVRLFPQLREVGARMLLQVHDELLLEAPKERAEEVAALAKEVMEGVWPLAVPLEVEVGIGEDWLAAKG

SEQ ID NO: 6239 - DNA, 2523 bp, synthetic construct
  misc_feature 1..2523: note = Variant of DNA polymerase I from Thermus sp. strain 2.9
  source 1..2523: mol_type = other DNA
atgcaccatcatcatcatcatggcggtagcggcgtgttaccggtgttcgagcctaaaggtcgcgtgcttctggttgatggccatcatctcgcgtatcgtaacttctttgccctgaaaggattaaccaccagcctgggcgagccggtacagggtgtctacggctttgcaaagtcgctcctgaaagctctgaaagaagacggtgatgtggtgattgttgtctttgatgcgaaagcgccaagttttcgccacgaagcgtacgaagcttacaaagccgggcgtgctccaacgccggaagactttcctcgccaattggcgcttatgaaggaattagtggatttgcttggcctcgaacgcttggaagttcccggtttcgaggcagacgacgtattagcgactctcgcaaagaaagccgaacgtgagggctatgaagtccagatcttgacagcagatcgcgatcttttccagcttttatctccgcgcatctcggtgttacacccggaagggcatcgtatcaccccggaatggctctgggagaaatatggtttgcgtcccgaacaatgggtggattttcgcgccttagcaggcgatccgagcgacaatattccgggagttaaaggtatcggcgagaagacggcgctcaagctccttaaagaatgggggtcgttggagaacttgcttaagaatttagatcaggtcaaaccagagtcagtgcgtgagaagattcttgctcacctcgaagacctcaaattaagccgcgaattgtcccgtgtacgcaccgatttgccgctcgaagttgatttcggtcgccgccgcgaacctgactgggagggtcttaaagcgtttttagagcgtcttgaatttggttcgctcttgcatgaattcggccttttagaaagcccgttactggccgaagaagcaccttggccaccgcccgagggcgcgtttttaggttaccgtttgagtcgcccggaaccgatgtgggccgaattactggctcttgcagcgtctgcccagggacgtgtgtatcgcgcggaagaccctcatggtgcgctccgcggcctcttcgaagtccgtggactccttgccaaagacttagctgttgttgcattgcgcgaaggtcttgatttacctccgactgatgatccaatgcttcttgcgtacctcttggacccgtcaaacacgacgcccgaaggcgtagcccgtcgttacggcggcgagtggaccgaagatgcagcgaaacgcgcgttattggccgaacgtttgcacgaaaatttattaggacgtttgcaaggcgaggaacgtctcctctggctttacgaagaagtggagaaaccattgagtcgcgtgctcgcgcatatggaagctaccggtgtcaaattagacgtggcgtatttggaggcccttagccttgaagttgctgcccacatgcgccgcttggaggaagaagtattccgtttagcaggccgttcctttcgccttaactctcgcgatcagttagaacgtgtgttgttcgatgaacttggtctccctcctatcggcaagacagagaagaccggtaaacgtagcacttcagcggcggttttagaagctcttcgcgaagtccatcccattgtggacaagatcttgcagtaccgcgaaatggcgaaattgaaaggcacctatattgaccgtcttccggcattagtccacccgaaaacgggacgcctccatacccgcttcaaccaaacagccacggcgaccggtcgtttgtcctcctctgatccaaaccttcagaatattccagtacgtaccccattgggccagaagatccgccgtgcgtttgtagctgaggagggttggcgtttagtggccctcgattatcgtcaaattgaattacgtgtccttgcccatctttctggcgatgagaacctcatccgcgtgtttcaggaaggcaaagacattcacactcaaacggcaagctggatgtttggattatcagctgaagcgatcgatcctttgatgcgtcgtgcagcgaagaccatcaatttcggtgttctctacggtatgagtgcctttcgtttgtcgcaggaattaggcattccctatgaagaagctcaggcgttcattcagaaatactttcaaagctatcccaaagttaaagcatggatcgagaagactctccgtgaaggccgcacacgtggttacgtagagaccttatttggacgtcgccgctatgttcccgatttaaacgctcgcgtgaaaagcaaacgtgaagccgccgaacgcatggcgttcaacatgcctgtacagggcacggcagctgacctcatgaaacttgcaatggtgcgcctttttccacaattgcgtgaagttggtgcccgcatgctcttgcaggtccacgatgaactcttgttagaagcgccaaaagagcgtgcggaagaggtggcagccctcgcgaaagaagttatggaaggcgtgtggcccttagcggtgcctcttgaagtcgaagttggtattggcgaggattggctggctgccaaagga

SEQ ID NO: 6240 - protein, 841 aa, synthetic construct
  REGION 1..841: note = Variant of DNA polymerase I from Thermus sp. strain 2.9
MHHHHHHGGSGVLPVFEPKGRVLLVDGHHLAYRNFFALKGLTTSLGEPVQGVYGFAKSLLKALKEDGDVVIVVFDAKAPSFRHEAYEAYKAGRAPTPEDFPRQLALMKELVDLLGLERLEVPGFEADDVLATLAKKAEREGYEVQILTADRDLFQLLSPRISVLHPEGHRITPEWLWEKYGLRPEQWVDFRALAGDPSDNIPGVKGIGEKTALKLLKEWGSLENLLKNLDQVKPESVREKILAHLEDLKLSRELSRVRTDLPLEVDFGRRREPDWEGLKAFLERLEFGSLLHEFGLLESPLLAEEAPWPPPEGAFLGYRLSRPEPMWAELLALAASAQGRVYRAEDPHGALRGLFEVRGLLAKDLAVVALREGLDLPPTDDPMLLAYLLDPSNTTPEGVARRYGGEWTEDAAKRALLAERLHENLLGRLQGEERLLWLYEEVEKPLSRVLAHMEATGVKLDVAYLEALSLEVAAHMRRLEEEVFRLAGRSFRLNSRDQLERVLFDELGLPPIGKTEKTGKRSTSAAVLEALREVHPIVDKILQYREMAKLKGTYIDRLPALVHPKTGRLHTRFNQTATATGRLSSSDPNLQNIPVRTPLGQKIRRAFVAEEGWRLVALDYRQIELRVLAHLSGDENLIRVFQEGKDIHTQTASWMFGLSAEAIDPLMRRAAKTINFGVLYGMSAFRLSQELGIPYEEAQAFIQKYFQSYPKVKAWIEKTLREGRTRGYVETLFGRRRYVPDLNARVKSKREAAERMAFNMPVQGTAADLMKLAMVRLFPQLREVGARMLLQVHDELLLEAPKERAEEVAALAKEVMEGVWPLAVPLEVEVGIGEDWLAAKG

SEQ ID NO: 6241 - DNA, 2523 bp, synthetic construct
  misc_feature 1..2523: note = Variant of DNA polymerase I from Thermus sp. strain 2.9
  source 1..2523: mol_type = other DNA
atgcaccatcatcatcatcatggcggtagcggcgtgttaccggtgttcgagcctaaaggtcgcgtgcttctggttgatggccatcatctcgcgtatcgtaacttctttgccctgaaaggattaaccaccagcctgggcgagccggtacagggtgtctacggctttgcaaagtcgctcctgaaagctctgaaagaagacggtgatgtggtgattgttgtctttgatgcgaaagcgccaagttttcgccacgaagcgtacgaagcttacaaagccgggcgtgctccaacgccggaagactttcctcgccaattggcgcttatgaaggaattagtggatttgcttggcctcgaacgcttggaagttcccggtttcgaggcagacgacgtattagcgactctcgcaaagaaagccgaacgtgagggctatgaagtccagatcttgacagcagatcgcgatcttttccagcttttatctccgcgcatctcggtgttacacccggaagggcatcgtatcaccccggaatggctctgggagaaatatggtttgcgtcccgaacaatgggtggattttcgcgccttagcaggcgatccgagcgacaatattccgggagttaaaggtatcggcgagaagacggcgctcaagctccttaaagaatgggggtcgttggagaacttgcttaagaatttagatcaggtcaaaccagagtcagtgcgtgagaagattcttgctcacctcgaagacctcaaattaagccgcgaattgtcccgtgtacgcaccgatttgccgctcgaagttgatttcggtcgccgccgcgaacctgactgggagggtcttaaagcgtttttagagcgtcttgaatttggttcgctcttgcatgaattcggccttttagaaagcccgttactggccgaagaagcaccttggccaccgcccgagggcgcgtttttaggttaccgtttgagtcgcccggaaccgatgtgggccgaattactggctcttgcagcgtctgcccagggacgtgtgtatcgcgcggaagaccctcatggtgcgctccgcggcctcttcgaagtccgtggactccttgccaaagacttagctgttgttgcattgcgcgaaggtcttgatttacctggtactgatgatccaatgcttcttgcgtacctcttggacccgtcaaacacgacgcccgaaggcgtagcccgtcgttacggcggcgagtggaccgaagatgcagcgaaacgcgcgttattggccgaacgtttgcacgaaaatttattaggacgtttgcaaggcgaggaacgtctcctctggctttacgaagaagtggagaaaccattgagtcgcgtgctcgcgcatatggaagctaccggtgtcaaattagacgtggcgtatttggagaatctcagccttgaagttgctgcccacatgcgccgcttggaggaagaagtattccgtttagcaggccgttcctttcgccttaactctcgcgatcagttagaacgtgtgttgttcgatgaacttggtctccctcctatcggcaagacagagaagaccggtaaacgtagcacttcagcggcggttttagaagctcttcgcgaagtccatcccattgtggacaagatcttgcagtaccgcgaaatggcgaaattgaaaggcacctatattgaccgtcttccggcattagtccacccgaaaacgggacgcctccatacccgcttcaaccaaacagccacggcgaccggtcgtttgtcctcctctgatccaaaccttcagaatattccagtacgtaccccattgggccagaagatccgccgtgcgtttgtagctgaggagggttggcgtttagtggccctcgattatcgtcaaattgaactacgtgtccttgcccatctttctggcgatgagaacctcatccgcgtgtttcaggaaggcaaagacattcacactcaaacggcaagctggatgtttggattatcagctgaagcgatcgatcctttgatgcgtcgtgcagcgaagaccatcaatttcggtgttctctacggtatgagtgcctttcgtttgtcgcaggaattaggcattccctatgaagaagctcaggcgttcattcagaaatactttcaaagctatcccaaagttaaagcatggatcgagaagactctccgtgaaggccgcacacgtggttacgtagagaccttatttggacgtcgccgctatgttcccgatttaaacgctcgcgtgaaaggcaagcgtgaagccgccgaacgcatggcgttcaacatgcctgtacagggcacggcagctgacctcatgaaacttgcaatggtgcgcctttttccacaattgcgtgaagttggtgcccgcatgctcttgcaggtccacgatgaactcttgttagaagcgccaaaagagcgtgcggaagaggtggcagccctcgcgaaagaagttatggaaggcgtgtggcccttagcggtgcctcttgaagtcgaagttggtattggcgaggattggctggctgccaaagga

SEQ ID NO: 6242 - protein, 841 aa, synthetic construct
  REGION 1..841: note = Variant of DNA polymerase I from Thermus sp. strain 2.9
MHHHHHHGGSGVLPVFEPKGRVLLVDGHHLAYRNFFALKGLTTSLGEPVQGVYGFAKSLLKALKEDGDVVIVVFDAKAPSFRHEAYEAYKAGRAPTPEDFPRQLALMKELVDLLGLERLEVPGFEADDVLATLAKKAEREGYEVQILTADRDLFQLLSPRISVLHPEGHRITPEWLWEKYGLRPEQWVDFRALAGDPSDNIPGVKGIGEKTALKLLKEWGSLENLLKNLDQVKPESVREKILAHLEDLKLSRELSRVRTDLPLEVDFGRRREPDWEGLKAFLERLEFGSLLHEFGLLESPLLAEEAPWPPPEGAFLGYRLSRPEPMWAELLALAASAQGRVYRAEDPHGALRGLFEVRGLLAKDLAVVALREGLDLPGTDDPMLLAYLLDPSNTTPEGVARRYGGEWTEDAAKRALLAERLHENLLGRLQGEERLLWLYEEVEKPLSRVLAHMEATGVKLDVAYLENLSLEVAAHMRRLEEEVFRLAGRSFRLNSRDQLERVLFDELGLPPIGKTEKTGKRSTSAAVLEALREVHPIVDKILQYREMAKLKGTYIDRLPALVHPKTGRLHTRFNQTATATGRLSSSDPNLQNIPVRTPLGQKIRRAFVAEEGWRLVALDYRQIELRVLAHLSGDENLIRVFQEGKDIHTQTASWMFGLSAEAIDPLMRRAAKTINFGVLYGMSAFRLSQELGIPYEEAQAFIQKYFQSYPKVKAWIEKTLREGRTRGYVETLFGRRRYVPDLNARVKGKREAAERMAFNMPVQGTAADLMKLAMVRLFPQLREVGARMLLQVHDELLLEAPKERAEEVAALAKEVMEGVWPLAVPLEVEVGIGEDWLAAKG

SEQ ID NO: 6243 - DNA, 2523 bp, synthetic construct
  misc_feature 1..2523: note = Variant of DNA polymerase I from Thermus sp. strain 2.9
  source 1..2523: mol_type = other DNA
atgcaccatcatcatcatcatggcggtagcggcgtgttaccggtgttcgagcctaaaggtcgcgtgcttctggttgatggccatcatctcgcgtatcgtaacttctttgccctgaaaggattaaccaccagcctgggcgagccggtacagggtgtctacggctttgcaaagtcgctcctgaaagctctgaaagaagacggtgatgtggtgattgttgtctttgatgcgaaagcgccaagttttcgccacgaagcgtacgaagcttacaaagccgggcgtgctccaacgccggaagactttcctcgccaattggcgcttatgaaggaattagtggatttgcttggcctcgaacgcttggaagttcccggtttcgaggcagacgacgtattagcgactctcgcaaagaaagccgaacgtgagggctatgaagtccagatcttgacagcagatcgcgatcttttccagcttttatctccgcgcatctcggtgttacacccggaagggcatcgtatcaccccggaatggctctgggagaaatatggtttgcgtcccgaacaatgggtggattttcgcgccttagcaggcgatccgagcgacaatattccgggagttaaaggtatcggcgagaagacggcgctcaagctccttaaagaatgggggtcgttggagaacttgcttaagaatttagatcaggtcaaaccagagtcagtgcgtgagaagattcttgctcacctcgaagacctcaaattaagccgcgaattgtcccgtgtacgcaccgatttgccgctcgaagttgatttcggtcgccgccgcgaacctgactgggagggtcttaaagcgtttttagagcgtcttgaatttggttcgctcttgcatgaattcggccttttagaaagcccgttactggccgaagaagcaccttggccaccgcccgagggcgcgtttttaggttaccgtttgagtcgcccggaaccgatgtgggccgaattactggctcttgcagcgtctgcccagggacgtgtgtatcgcgcggaagaccctcatggtgcgctccgcggcctcttcgaagtccgtggactccttgccaaagacttagctgttgttgcattgcgcgaaggtcttgatttacctccgactgatgatccaatgcttcttgcgtacctcttggacccgtcaaacacgacgcccgaaggcgtagcccgtcgttacggcggcgagtggaccgaagatgcagcgaaacgcgcgttattggccgaacgtttgcacgaaaatttattaggacgtttgcaaggcgaggaacgtctcctctggctttacgaagaagtggagaaaccattgagtcgcgtgctcgcgcatatggaagctaccggtgtcaaattagacgtggcgtatttggagaatctcagccttgaagttgctgcccacatgcgccgcttggaggaagaagtattccgtttagcaggccgttcctttcgccttaactctcgcgatcagttagaacgtgtgttgttcgatgaacttggtctccctcctatcggcaagacagagaagaccggtaaacgtagcacttcagcggcggttttagaagctcttcgcgaagtccatcccattgtggacaagatcttgcagtaccgcgaaatggcgaaattgaaaggcacctatattgaccgtcttccggcattagtccacccgaaaacgggacgcctccatacccgcttcaaccaaacagccacggcgaccggtcgtttgtcctcctctgatccaaaccttcagaatattccagtacgtaccccattgggccagaagatccgccgtgcgtttgtagctgaggagggttggcgtttagtggccctcgattatcgtcaaattgaattacgtgtccttgcccatctttctggcgatgagaacctcatccgcgtgtttcaggaaggcaaagacattcacactcaaacggcaagctggatgtttggattatcagctgaagcgatcgatcctttgatgcgtcgtgcagcgaagaccatcaatttcggtgttctctacggtatgagtgcctttcgtttgtcgcaggaattaggcattccctatgaagaagctcaggcgttcattcagaaatactttcaaagctatcccaaagttaaagcatggatcgagaagactctccgtgaaggccgcacacgtggttacgtagagaccttatttggacgtcgccgctatgttcccgatttaaacgctcgcgtgaaaggcaagcgtgaagccgccgaacgcatggcgttcaacatgcctgtacagggcacggcagctgacctcatgaaacttgcaatggtgcgcctttttccacaattgcgtgaagttcgggcccgcatgctcttgcaggtccacgatgaactcttgttagaagcgccaaaagagcgtgcggaagaggtggcagccctcgcgaaagaagttatggaaggcgtgtggcccttagcggtgcctcttgaagtcgaagttggtattggcgaggattggctggctgccaaagga

SEQ ID NO: 6244 - protein, 841 aa, synthetic construct
  REGION 1..841: note = Variant of DNA polymerase I from Thermus sp. strain 2.9
MHHHHHHGGSGVLPVFEPKGRVLLVDGHHLAYRNFFALKGLTTSLGEPVQGVYGFAKSLLKALKEDGDVVIVVFDAKAPSFRHEAYEAYKAGRAPTPEDFPRQLALMKELVDLLGLERLEVPGFEADDVLATLAKKAEREGYEVQILTADRDLFQLLSPRISVLHPEGHRITPEWLWEKYGLRPEQWVDFRALAGDPSDNIPGVKGIGEKTALKLLKEWGSLENLLKNLDQVKPESVREKILAHLEDLKLSRELSRVRTDLPLEVDFGRRREPDWEGLKAFLERLEFGSLLHEFGLLESPLLAEEAPWPPPEGAFLGYRLSRPEPMWAELLALAASAQGRVYRAEDPHGALRGLFEVRGLLAKDLAVVALREGLDLPPTDDPMLLAYLLDPSNTTPEGVARRYGGEWTEDAAKRALLAERLHENLLGRLQGEERLLWLYEEVEKPLSRVLAHMEATGVKLDVAYLENLSLEVAAHMRRLEEEVFRLAGRSFRLNSRDQLERVLFDELGLPPIGKTEKTGKRSTSAAVLEALREVHPIVDKILQYREMAKLKGTYIDRLPALVHPKTGRLHTRFNQTATATGRLSSSDPNLQNIPVRTPLGQKIRRAFVAEEGWRLVALDYRQIELRVLAHLSGDENLIRVFQEGKDIHTQTASWMFGLSAEAIDPLMRRAAKTINFGVLYGMSAFRLSQELGIPYEEAQAFIQKYFQSYPKVKAWIEKTLREGRTRGYVETLFGRRRYVPDLNARVKGKREAAERMAFNMPVQGTAADLMKLAMVRLFPQLREVRARMLLQVHDELLLEAPKERAEEVAALAKEVMEGVWPLAVPLEVEVGIGEDWLAAKG

SEQ ID NO: 6245 - DNA, 2523 bp, synthetic construct
  misc_feature 1..2523: note = Variant of DNA polymerase I from Thermus sp. strain 2.9
  source 1..2523: mol_type = other DNA
atgcaccatcatcatcatcatggcggtagcggcgtgttaccggtgttcgagcctaaaggtcgcgtgcttctggttgatggccatcatctcgcgtatcgtaacttctttgccctgaaaggattaaccaccagcctgggcgagccggtacagggtgtctacggctttgcaaagtcgctcctgaaagctctgaaagaagacggtgatgtggtgattgttgtctttgatgcgaaagcgccaagttttcgccacgaagcgtacgaagcttacaaagccgggcgtgctccaacgccggaagactttcctcgccaattggcgcttatgaaggaattagtggatttgcttggcctcgaacgcttggaagttcccggtttcgaggcagacgacgtattagcgactctcgcaaagaaagccgaacgtgagggctatgaagtccagatcttgacagcagatcgcgatcttttccagcttttatctccgcgcatctcggtgttacacccggaagggcatcgtatcaccccggaatggctctgggagaaatatggtttgcgtcccgaacaatgggtggattttcgcgccttagcaggcgatccgagcgacaatattccgggagttaaaggtatcggcgagaagacggcgctcaagctccttaaagaatgggggtcgttggagaacttgcttaagaatttagatcaggtcaaaccagagtcagtgcgtgagaagattcttgctcacctcgaagacctcaaattaagccgcgaattgtcccgtgtacgcaccgatttgccgctcgaagttgatttcggtcgccgccgcgaacctgactgggagggtcttaaagcgtttttagagcgtcttgaatttggttcgctcttgcatgaattcggccttttagaaagcccgttactggccgaagaagcaccttggccaccgcccgagggcgcgtttttaggttaccgtttgagtcgcccggaaccgatgtgggccgaattactggctcttgcagcgtctgcccagggacgtgtgtatcgcgcggaagaccctcatggtgcgctccgcggcctcttcgaagtccgtggactccttgccaaagacttagctgttgttgcattgcgcgaaggtcttgatttacctccgactgatgatccaatgcttcttgcgtacctcttggacccgtcaaacacgacgcccgaaggcgtagcccgtcgttacggcggcgagtggaccgaagatgcagcgaaacgcgcgttattggccgaacgtttgcacgaaaatttattaggacgtttgcaaggcgaggaacgtctcctctggctttacgaagaagtggagaaaccattgagtcgcgtgctcgcgcatatggaagctaccggtgtcaaattagacgtggcgtatttggagaatctcagccttgaagttgctgcccacatgcgccgcttggaggaagaagtattccgtttagcaggccgttcctttcgccttaactctcgcgatcagttagaacgtgtgttgttcgatgaacttggtctccctcctatcggcaagacagagaagaccggtaaacgtagcacttcagcggcggttttagaagctcttcgcgaagtccatcccattgtggacaagatcttgcagtaccgcgaaatggcgaaattgaaaggcacctatattgaccgtcttccggcattagtccacccgaaaacgggacgcctccatacccgcttcaaccaaacagccacggcgaccggtcgtttgtcctcctctgatccaaaccttcagaatattccagtacgtaccccattgggccagaagatccgccgtgcgtttgtagctgaggagggttggcgtttagtggccctcgattatcgtcaaattgaattacgtgtccttgcccatctttctggcgatgagaacctcatccgcgtgtttcaggaaggcaaagacattcacactcaaacggcaagctggatgtttggattatcagctgaagcgatcgatcctttgatgcgtcgtgcagcgaagaccatcaatttcggtgttctctacggtatgagtgcctttcgtttgtcgcaggaattaggcattccctatgaagaagctcagtggttcattcagaaatactttcaaagctatcccaaagttaaagcatggatcgagaagactctccgtgaaggccgcacacgtggttacgtagagaccttatttggacgtcgccgctatgttcccgatttaaacgctcgcgtgaaaggcaagcgtgaagccgccgaacgcatggcgttcaacatgcctgtacagggcacggcagctgacctcatgaaacttgcaatggtgcgcctttttccacaattgcgtgaagttggtgcccgcatgctcttgcaggtccacgatgaactcttgttagaagcgccaaaagagcgtgcggaagaggtggcagccctcgcgaaagaagttatggaaggcgtgtggcccttagcggtgcctcttgaagtcgaagttggtattggcgaggattggctggctgccaaagga

SEQ ID NO: 6246 - protein, 841 aa, synthetic construct
  REGION 1..841: note = Variant of DNA polymerase I from Thermus sp. strain 2.9
MHHHHHHGGSGVLPVFEPKGRVLLVDGHHLAYRNFFALKGLTTSLGEPVQGVYGFAKSLLKALKEDGDVVIVVFDAKAPSFRHEAYEAYKAGRAPTPEDFPRQLALMKELVDLLGLERLEVPGFEADDVLATLAKKAEREGYEVQILTADRDLFQLLSPRISVLHPEGHRITPEWLWEKYGLRPEQWVDFRALAGDPSDNIPGVKGIGEKTALKLLKEWGSLENLLKNLDQVKPESVREKILAHLEDLKLSRELSRVRTDLPLEVDFGRRREPDWEGLKAFLERLEFGSLLHEFGLLESPLLAEEAPWPPPEGAFLGYRLSRPEPMWAELLALAASAQGRVYRAEDPHGALRGLFEVRGLLAKDLAVVALREGLDLPPTDDPMLLAYLLDPSNTTPEGVARRYGGEWTEDAAKRALLAERLHENLLGRLQGEERLLWLYEEVEKPLSRVLAHMEATGVKLDVAYLENLSLEVAAHMRRLEEEVFRLAGRSFRLNSRDQLERVLFDELGLPPIGKTEKTGKRSTSAAVLEALREVHPIVDKILQYREMAKLKGTYIDRLPALVHPKTGRLHTRFNQTATATGRLSSSDPNLQNIPVRTPLGQKIRRAFVAEEGWRLVALDYRQIELRVLAHLSGDENLIRVFQEGKDIHTQTASWMFGLSAEAIDPLMRRAAKTINFGVLYGMSAFRLSQELGIPYEEAQWFIQKYFQSYPKVKAWIEKTLREGRTRGYVETLFGRRRYVPDLNARVKGKREAAERMAFNMPVQGTAADLMKLAMVRLFPQLREVGARMLLQVHDELLLEAPKERAEEVAALAKEVMEGVWPLAVPLEVEVGIGEDWLAAKG

SEQ ID NO: 6247 - DNA, 2523 bp, synthetic construct
  misc_feature 1..2523: note = Variant of DNA polymerase I from Thermus sp. strain 2.9
  source 1..2523: mol_type = other DNA
atgcaccatcatcatcatcatggcggtagcggcgtgttaccggtgttcgagcctaaaggtcgcgtgcttctggttgatggccatcatctcgcgtatcgtaacttctttgccctgaaaggattaaccaccagcctgggcgagccggtacagggtgtctacggctttgcaaagtcgctcctgaaagctctgaaagaagacggtgatgtggtgattgttgtctttgatgcgaaagcgccaagttttcgccacgaagcgtacgaagcttacaaagccgggcgtgctccaacgccggaagactttcctcgccaattggcgcttatgaaggaattagtggatttgcttggcctcgaacgcttggaagttcccggtttcgaggcagacgacgtattagcgactctcgcaaagaaagccgaacgtgagggctatgaagtccagatcttgacagcagatcgcgatcttttccagcttttatctccgcgcatctcggtgttacacccggaagggcatcgtatcaccccggaatggctctgggagaaatatggtttgcgtcccgaacaatgggtggattttcgcgccttagcaggcgatccgagcgacaatattccgggagttaaaggtatcggcgagaagacggcgctcaagctccttaaagaatgggggtcgttggagaacttgcttaagaatttagatcaggtcaaaccagagtcagtgcgtgagaagattcttgctcacctcgaagacctcaaattaagccgcgaattgtcccgtgtacgcaccgatttgccgctcgaagttgatttcggtcgccgccgcgaacctgactgggagggtcttaaagcgtttttagagcgtcttgaatttggttcgctcttgcatgaattcggccttttagaaagcccgttactggccgaagaagcaccttggccaccgcccgagggcgcgtttttaggttaccgtttgagtcgcccggaaccgatgtgggccgaattactggctcttgcagcgtctgcccagggacgtgtgtatcgcgcggaagaccctcatggtgcgctccgcggcctcttcgaagtccgtggactccttgccaaagacttagctgttgttgcattgcgcgaaggtcttgatttacctccgactgatgatccaatgcttcttgcgtacctcttggacccgtcaaacacgacgcccgaaggctcggcccgtcgttacggcggcgagtggaccgaagatgcagcgaaacgcgcgttattggccgaacgtttgcacgaaaatttattaggacgtttgcaaggcgaggaacgtctcctctggctttacgaagaagtggagaaaccattgagtcgcgtgctcgcgcatatggaagctaccggtgtcaaattagacgtggcgtatttggagaatctcagccttgaagttgctgcccacatgcgccgcttggaggaagaagtattccgtttagcaggccgttcctttcgccttaactctcgcgatcagttagaacgtgtgttgttcgatgaacttggtctccctcctatcggcaagacagagaagaccggtaaacgtagcacttcagcggcggttttagaagctcttcgcgaagtccatcccattgtggacaagatcttgcagtaccgcgaaatggcgaaattgaaaggcacctatattgaccgtcttccggcattagtccacccgaaaacgggacgcctccatacccgcttcaaccaaacagccacggcgaccggtcgtttgtcctcctctgatccaaaccttcagaatattccagtacgtaccccattgggccagaagatccgccgtgcgtttgtagctgaggagggttggcgtttagtggccctcgattatcgtcaaattgaattacgtgtccttgcccatctttctggcgatgagaacctcatccgcgtgtttcaggaaggcaaagacattcacactcaaacggcaagctggatgtttggattatcagctgaagcgatcgatcctttgatgcgtcgtgcagcgaagaccatcaatttcggtgttctctacggtatgagtgcctttcgtttgtcgcaggaattaggcattccctatgaagaagctcaggcgttcattcagaaatactttcaaagctatcccaaagttaaagcatggatcgagaagactctccgtgaaggccgcacacgtggttacgtagagaccttatttggacgtcgccgctatgttcccgatttaaacgctcgcgtgaaaggcaagcgtgaagccgccgaacgcatggcgttcaacatgcctgtacagggcacggcagctgacctcatgaaacttgcaatggtgcgcctttttccacaattgcgtgaagttggtgcccgcatgctcttgcaggtccacgatgaactcttgttagaagcgccaaaagagcgtgcggaagaggtggcagccctcgcgaaagaagttatggaaggcgtgtggcccttagcggtgcctcttgaagtcgaagttggtattggcgaggattggctggctgccaaagga

SEQ ID NO: 6248 - protein, 841 aa, synthetic construct
  REGION 1..841: note = Variant of DNA polymerase I from Thermus sp. strain 2.9
MHHHHHHGGSGVLPVFEPKGRVLLVDGHHLAYRNFFALKGLTTSLGEPVQGVYGFAKSLLKALKEDGDVVIVVFDAKAPSFRHEAYEAYKAGRAPTPEDFPRQLALMKELVDLLGLERLEVPGFEADDVLATLAKKAEREGYEVQILTADRDLFQLLSPRISVLHPEGHRITPEWLWEKYGLRPEQWVDFRALAGDPSDNIPGVKGIGEKTALKLLKEWGSLENLLKNLDQVKPESVREKILAHLEDLKLSRELSRVRTDLPLEVDFGRRREPDWEGLKAFLERLEFGSLLHEFGLLESPLLAEEAPWPPPEGAFLGYRLSRPEPMWAELLALAASAQGRVYRAEDPHGALRGLFEVRGLLAKDLAVVALREGLDLPPTDDPMLLAYLLDPSNTTPEGSARRYGGEWTEDAAKRALLAERLHENLLGRLQGEERLLWLYEEVEKPLSRVLAHMEATGVKLDVAYLENLSLEVAAHMRRLEEEVFRLAGRSFRLNSRDQLERVLFDELGLPPIGKTEKTGKRSTSAAVLEALREVHPIVDKILQYREMAKLKGTYIDRLPALVHPKTGRLHTRFNQTATATGRLSSSDPNLQNIPVRTPLGQKIRRAFVAEEGWRLVALDYRQIELRVLAHLSGDENLIRVFQEGKDIHTQTASWMFGLSAEAIDPLMRRAAKTINFGVLYGMSAFRLSQELGIPYEEAQAFIQKYFQSYPKVKAWIEKTLREGRTRGYVETLFGRRRYVPDLNARVKGKREAAERMAFNMPVQGTAADLMKLAMVRLFPQLREVGARMLLQVHDELLLEAPKERAEEVAALAKEVMEGVWPLAVPLEVEVGIGEDWLAAKG

SEQ ID NO: 6249 - DNA, 2523 bp, synthetic construct
  misc_feature 1..2523: note = Variant of DNA polymerase I from Thermus sp. strain 2.9
  source 1..2523: mol_type = other DNA
atgcaccatcatcatcatcatggcggtagcggcgtgttaccggtgttcgagcctaaaggtcgcgtgcttctggttgatggccatcatctcgcgtatcgtaacttctttgccctgaaaggattaaccaccagcctgggcgagccggtacagggtgtctacggctttgcaaagtcgctcctgaaagctctgaaagaagacggtgatgtggtgattgttgtctttgatgcgaaagcgccaagttttcgccacgaagcgtacgaagcttacaaagccgggcgtgctccaacgccggaagactttcctcgccaattggcgcttatgaaggaattagtggatttgcttggcctcgaacgcttggaagttcccggtttcgaggcagacgacgtattagcgactctcgcaaagaaagccgaacgtgagggctatgaagtccagatcttgacagcagatcgcgatcttttccagcttttatctccgcgcatctcggtgttacacccggaagggcatcgtatcaccccggaatggctctgggagaaatatggtttgcgtcccgaacaatgggtggattttcgcgccttagcaggcgatccgagcgacaatattccgggagttaaaggtatcggcgagaagacggcgctcaagctccttaaagaatgggggtcgttggagaacttgcttaagaatttagatcaggtcaaaccagagtcagtgcgtgagaagattcttgctcacctcgaagacctcaaattaagccgcgaattgtcccgtgtacgcaccgatttgccgctcgaagttgatttcggtcgccgccgcgaacctgactgggagggtcttaaagcgtttttagagcgtcttgaatttggttcgctcttgcatgaattcggccttttagaaagcccgttactggccgaagaagcaccttggccaccgcccgagggcgcgtttttaggttaccgtttgagtcgcccggaaccgatgtgggccgaattactggctcttgcagcgtctgcccagggacgtgtgtatcgcgcggaagaccctcatggtgcgctccgcggcctcttcgaagtccgtggactccttgccaaagttttagctgttgttgcattgcgcgaaggtcttgatttacctccgactgatgatccaatgcttcttgcgtacctcttggacccgtcaaacacgacgcccgaaggcgtagcccgtcgttacggcggcgagtggaccgaagatgcagcgaaacgcgcgttattggccgaacgtttgcacgaaaatttattaggacgtttgcaaggcgaggaacgtctcctctggctttacgaagaagtggagaaaccattgagtcgcgtgctcgcgcatatggaagctaccggtgtcaaattagacgtggcgtatttggagaatctcagccttgaagttgctgcccacatgcgccgcttggaggaagaagtattccgtttagcaggccgttcctttcgccttaactctcgcgatcagttagaacgtgtgttgttcgatgaacttggtctccctcctatcggcaagacagagaagaccggtaaacgtagcacttcagcggcggttttagaagctcttcgcgaagtccatcccattgtggacaagatcttgcagtaccgcgaaatggcgaaattgaaaggcacctatattgaccgtcttccggcattagtccacccgaaaacgggacgcctccatacccgcttcaaccaaacagccacggcgaccggtcgtttgtcctcctctgatccaaaccttcagaatattccagtacgtaccccattgggccagaagatccgccgtgcgtttgtagctgaggagggttggcgtttagtggccctcgattatcgtcaaattgaattacgtgtccttgcccatctttctggcgatgagaacctcatccgcgtgtttcaggaaggcaaagacattcacactcaaacggcaagctggatgtttggattatcagctgaagcgatcgatcctttgatgcgtcgtgcagcgaagaccatcaatttcggtgttctctacggtatgagtgcctttcgtttgtcgcaggaattaggcattccctatgaagaagctcaggcgttcattcagaaatactttcaaagctatcccaaagttaaagcatggatcgagaagactctccgtgaaggccgcacacgtggttacgtagagaccttatttggacgtcgccgctatgttcccgatttaaacgctcgcgtgaaaggcaagcgtgaagccgccgaacgcatggcgttcaacatgcctgtacagggcacggcagctgacctcatgaaacttgcaatggtgcgcctttttccacaattgcgtgaagttggtgcccgcatgctcttgcaggtccacgatgaactcttgttagaagcgccaaaagagcgtgcggaagaggtggcagccctcgcgaaagaagttatggaaggcgtgtggcccttagcggtgcctcttgaagtcgaagttggtattggcgaggattggctggctgccaaagga

SEQ ID NO: 6250 - protein, 841 aa, synthetic construct
  REGION 1..841: note = Variant of DNA polymerase I from Thermus sp. strain 2.9
MHHHHHHGGSGVLPVFEPKGRVLLVDGHHLAYRNFFALKGLTTSLGEPVQGVYGFAKSLLKALKEDGDVVIVVFDAKAPSFRHEAYEAYKAGRAPTPEDFPRQLALMKELVDLLGLERLEVPGFEADDVLATLAKKAEREGYEVQILTADRDLFQLLSPRISVLHPEGHRITPEWLWEKYGLRPEQWVDFRALAGDPSDNIPGVKGIGEKTALKLLKEWGSLENLLKNLDQVKPESVREKILAHLEDLKLSRELSRVRTDLPLEVDFGRRREPDWEGLKAFLERLEFGSLLHEFGLLESPLLAEEAPWPPPEGAFLGYRLSRPEPMWAELLALAASAQGRVYRAEDPHGALRGLFEVRGLLAKVLAVVALREGLDLPPTDDPMLLAYLLDPSNTTPEGVARRYGGEWTEDAAKRALLAERLHENLLGRLQGEERLLWLYEEVEKPLSRVLAHMEATGVKLDVAYLENLSLEVAAHMRRLEEEVFRLAGRSFRLNSRDQLERVLFDELGLPPIGKTEKTGKRSTSAAVLEALREVHPIVDKILQYREMAKLKGTYIDRLPALVHPKTGRLHTRFNQTATATGRLSSSDPNLQNIPVRTPLGQKIRRAFVAEEGWRLVALDYRQIELRVLAHLSGDENLIRVFQEGKDIHTQTASWMFGLSAEAIDPLMRRAAKTINFGVLYGMSAFRLSQELGIPYEEAQAFIQKYFQSYPKVKAWIEKTLREGRTRGYVETLFGRRRYVPDLNARVKGKREAAERMAFNMPVQGTAADLMKLAMVRLFPQLREVGARMLLQVHDELLLEAPKERAEEVAALAKEVMEGVWPLAVPLEVEVGIGEDWLAAKG

SEQ ID NO: 6251 - DNA, 2523 bp, synthetic construct
  misc_feature 1..2523: note = Variant of DNA polymerase I from Thermus sp. strain 2.9
  source 1..2523: mol_type = other DNA
atgcaccatcatcatcatcatggcggtagcggcgtgttaccggtgttcgagcctaaaggtcgcgtgcttctggttgatggccatcatctcgcgtatcgtaacttctttgccctgaaaggattaaccaccagcctgggcgagccggtacagggtgtctacggctttgcaaagtcgctcctgaaagctctgaaagaagacggtgatgtggtgattgttgtctttgatgcgaaagcgccaagttttcgccacgaagcgtacgaagcttacaaagccgggcgtgctccaacgccggaagactttcctcgccaattggcgcttatgaaggaattagtggatttgcttggcctcgaacgcttggaagttcccggtttcgaggcagacgacgtattagcgactctcgcaaagaaagccgaacgtgagggctatgaagtccagatcttgacagcagatcgcgatcttttccagcttttatctccgcgcatctcggtgttacacccggaagggcatcgtatcaccccggaatggctctgggagaaatatggtttgcgtcccgaacaatgggtggattttcgcgccttagcaggcgatccgagcgacaatattccgggagttaaaggtatcggcgagaagacggcgctcaagctccttaaagaatgggggtcgttggagaacttgcttaagaatttagatcaggtcaaaccagagtcagtgcgtgagaagattcttgctcacctcgaagacctcaaattaagccgcgaattgtcccgtgtacgcaccgatttgccgctcgaagttgatttcggtcgccgccgcgaacctgactgggagggtcttaaagcgtttttagagcgtcttgaatttggttcgctcttgcatgaattcggccttttagaaagcccgttaccggccgaagaagcaccttggccaccgcccgagggcgcgtttttaggttaccgtttgagtcgcccggaaccgatgtgggccgaattactggctcttgcagcgtctgcccagggacgtgtgtatcgcgcggaagaccctcatggtgcgctccgcggcctcttcgaagtccgtggactccttgccaaagacttagctgttgttgcattgcgcgaaggtcttgatttacctccgactgatgatccaatgcttcttgcgtacctcttggacccgtcaaacacgacgcccgaaggcgtagcccgtcgttacggcggcgagtggaccgaagatgcagcgaaacgcgcgttattggccgaacgtttgcacgaaaatttattaggacgtttgcaaggcgaggaacgtctcctctggctttacgaagaagtggagaaaccattgagtcgcgtgctcgcgcatatggaagctaccggtgtcaaattagacgtggcgtatttggaggcccttagccttgaagttgctgcccacatgcgccgcttggaggaagaagtattccgtttagcaggccgttcctttcgccttaactctcgcgatcagttagaacgtgtgttgttcgatgaacttggtctccctcctatcggcaagacagagaagaccggtaaacgtagcacttcagcggcggttttagaagctcttcgcgaagtccatcccattgtggacaagatcttgcagtaccgcgaaatggcgaaattgaaaggcacctatattgaccgtcttccggcattagtccacccgaaaacgggacgcctccatacccgcttcaaccaaacagccacggcgaccggtcgtttgtcctcctctgatccaaaccttcagaatattccagtacgtaccccattgggccagaagatccgccgtgcgtttgtagctgaggagggttggcgtttagtggccctcgattatcgtcaaattgaattacgtgtccttgcccatctttctggcgatgagaacctcatccgcgtgtttcaggaaggcaaagacattcacactcaaacggcaagctggatgtttggattatcagctgaagcgatcgatcctttgatgcgtcgtgcagcgaagaccatcaatttcggtgttctctacggtatgagtgcctttcgtttgtcgcaggaattaggcattccctatgaagaagctcaggcgttcattcagaaatactttcaaagctatcccaaagttaaagcatggatcgagaagactctcgaggaaggccgcacacgtggttacgtagagaccttatttggacgtcgccgctatgttcccgatttaaacgctcgcgtgaaaagcaaacgtgaagccgccgaacgcatggcgttcaacatgcctgtacagggcacggcagctgacctcatgaaacttgcaatggtgcgcctttttccacaattgcgtgaagttggtgcccgcatgctcttgcaggtccacgatgaactcttgttagaagcgccaaaagagcgtgcggaagaggtggcagccctcgcgaaagaagttatggaaggcgtgtggcccttagcggtgcctcttgaagtcgaagttggtattggcgaggattggctggctgccaaagga

SEQ ID NO: 6252 - protein, 841 aa, synthetic construct
  REGION 1..841: note = Variant of DNA polymerase I from Thermus sp. strain 2.9
MHHHHHHGGSGVLPVFEPKGRVLLVDGHHLAYRNFFALKGLTTSLGEPVQGVYGFAKSLLKALKEDGDVVIVVFDAKAPSFRHEAYEAYKAGRAPTPEDFPRQLALMKELVDLLGLERLEVPGFEADDVLATLAKKAEREGYEVQILTADRDLFQLLSPRISVLHPEGHRITPEWLWEKYGLRPEQWVDFRALAGDPSDNIPGVKGIGEKTALKLLKEWGSLENLLKNLDQVKPESVREKILAHLEDLKLSRELSRVRTDLPLEVDFGRRREPDWEGLKAFLERLEFGSLLHEFGLLESPLPAEEAPWPPPEGAFLGYRLSRPEPMWAELLALAASAQGRVYRAEDPHGALRGLFEVRGLLAKDLAVVALREGLDLPPTDDPMLLAYLLDPSNTTPEGVARRYGGEWTEDAAKRALLAERLHENLLGRLQGEERLLWLYEEVEKPLSRVLAHMEATGVKLDVAYLEALSLEVAAHMRRLEEEVFRLAGRSFRLNSRDQLERVLFDELGLPPIGKTEKTGKRSTSAAVLEALREVHPIVDKILQYREMAKLKGTYIDRLPALVHPKTGRLHTRFNQTATATGRLSSSDPNLQNIPVRTPLGQKIRRAFVAEEGWRLVALDYRQIELRVLAHLSGDENLIRVFQEGKDIHTQTASWMFGLSAEAIDPLMRRAAKTINFGVLYGMSAFRLSQELGIPYEEAQAFIQKYFQSYPKVKAWIEKTLEEGRTRGYVETLFGRRRYVPDLNARVKSKREAAERMAFNMPVQGTAADLMKLAMVRLFPQLREVGARMLLQVHDELLLEAPKERAEEVAALAKEVMEGVWPLAVPLEVEVGIGEDWLAAKG

SEQ ID NO: 6253 - DNA, 2523 bp, synthetic construct
  misc_feature 1..2523: note = Variant of DNA polymerase I from Thermus sp. strain 2.9
  source 1..2523: mol_type = other DNA
atgcaccatcatcatcatcatggcggtagcggcgtgttaccggtgttcgagcctaaaggtcgcgtgcttctggttgatggccatcatctcgcgtatcgtaacttctttgccctgaaaggattaaccaccagcctgggcgagccggtacagggtgtctacggctttgcaaagtcgctcctgaaagctctgaaagaagacggtgatgtggtgattgttgtctttgatgcgaaagcgccaagttttcgccacgaagcgtacgaagcttacaaagccgggcgtgctccaacgccggaagactttcctcgccaattggcgcttatgaaggaattagtggatttgcttggcctcgaacgcttggaagttcccggtttcgaggcagacgacgtattagcgactctcgcaaagaaagccgaacgtgagggctatgaagtccagatcttgacagcagatcgcgatcttttccagcttttatctccgcgcatctcggtgttacacccggaagggcatcgtatcaccccggaatggctctgggagaaatatggtttgcgtcccgaacaatgggtggattttcgcgccttagcaggcgatccgagcgacaatattccgggagttaaaggtatcggcgagaagacggcgctcaagctccttaaagaatgggggtcgttggagaacttgcttaagaatttagatcaggtcaaaccagagtcagtgcgtgagaagattcttgctcacctcgaagacctcaaattaagccgcgaattgtcccgtgtacgcaccgatttgccgctcgaagttgatttcggtcgccgccgcgaacctgactgggagggtcttaaagcgtttttagagcgtcttgaatttggttcgctcttgcatgaattcggccttttagaaagcccgttactggccgaagaagcaccttggccaccgcccgagggcgcgtttttaggttaccgtttgagtcgcccggaaccgatgtgggccgaattactggctcttgcagcgtctgcccagggacgtgtgtatcgcgcggaagaccctcatggtgcgctccgcggcctcttcgaagtccgtggactccttgccaaagacttagctgttgttgcattgcgcgaaggtcttgatttacctccgactgatgatccaatgcttcttgcgtacctcttggacccgtcaaacacgacgcccgaaggcgtagcccgtcgttacggcggcgagtggaccgaagatgcagcgaaacgcgcgttattggccgaacgtttgcacgaaaatttattaggacgtttgcaaggcgaggaacgtctcctctggctttacgaagaagtggagaaaccattgagtcgcgtgctcgcgcatatggaagctaccggtgtcaaattagacgtggcgtatttggagaatctcagccttgaagttgctgcccacatgcgccgcttggaggaagaagtattccgtttagcaggccgttcctttcgccttaactctcgcgatcagttagaacgtgtgttgttcgatgaacttggtctccctcctatcggcaagacagagaagaccggtaaacgtagcacttcagcggcggttttagaagctcttcgcgaagtccatcccattgtggacaagatcttgcagtaccgcgaaatggcgaaattgaaaggcacctatattgaccgtcttccggcattagtccacccgaaaacgggacgcctccatacccgcttcaaccaaacagccacggcgaccggtcgtttgtcctcctctgatccaaaccttcagaatattccagtacgtaccccattgggccagaagatccgccgtgcgtttgtagctgaggagggttggcgtttagtggccctcgattatcgtcaaattgaattacgtgtccttgcccatctttctggcgatgagaacctcatccgcgtgtttcaggaaggcaaagacattcacactcaaacggcaagctggatgtttggattatcagctgaagcgatcgatcctttgatgcgtcgtgcagcgaagaccatcaatttcggtgttctctacggtatgagtgcctttcgtttgtcgcaggaattaggcattccctatgaagaagctcaggcgttcattcagaaatactttcaacgttatcccaaagttaaagcatggatcgagaagactctccgtgaaggccgcacacgtggttacgtagagaccttatttggacgtcgccgctatgttcccgatttaaacgctcgcgtgaaaggcaagcgtgaagccgccgaacgcatggcgttcaacatgcctgtacagggcacggcagctgacctcatgaaacttgcaatggtgcgcctttttccacaattgcgtgaagttggtgcccgcatgctcttgcaggtccacgatgaactcttgttagaagcgccaaaagagcgtgcggaagaggtggcagccctcgcgaaagaagttatggaaggcgtgtggcccttagcggtgcctcttgaagtcgaagttggtattggcgaggattggctggctgccaaagga

SEQ ID NO: 6254 - protein, 841 aa, synthetic construct
  REGION 1..841: note = Variant of DNA polymerase I from Thermus sp. strain 2.9
MHHHHHHGGSGVLPVFEPKGRVLLVDGHHLAYRNFFALKGLTTSLGEPVQGVYGFAKSLLKALKEDGDVVIVVFDAKAPSFRHEAYEAYKAGRAPTPEDFPRQLALMKELVDLLGLERLEVPGFEADDVLATLAKKAEREGYEVQILTADRDLFQLLSPRISVLHPEGHRITPEWLWEKYGLRPEQWVDFRALAGDPSDNIPGVKGIGEKTALKLLKEWGSLENLLKNLDQVKPESVREKILAHLEDLKLSRELSRVRTDLPLEVDFGRRREPDWEGLKAFLERLEFGSLLHEFGLLESPLLAEEAPWPPPEGAFLGYRLSRPEPMWAELLALAASAQGRVYRAEDPHGALRGLFEVRGLLAKDLAVVALREGLDLPPTDDPMLLAYLLDPSNTTPEGVARRYGGEWTEDAAKRALLAERLHENLLGRLQGEERLLWLYEEVEKPLSRVLAHMEATGVKLDVAYLENLSLEVAAHMRRLEEEVFRLAGRSFRLNSRDQLERVLFDELGLPPIGKTEKTGKRSTSAAVLEALREVHPIVDKILQYREMAKLKGTYIDRLPALVHPKTGRLHTRFNQTATATGRLSSSDPNLQNIPVRTPLGQKIRRAFVAEEGWRLVALDYRQIELRVLAHLSGDENLIRVFQEGKDIHTQTASWMFGLSAEAIDPLMRRAAKTINFGVLYGMSAFRLSQELGIPYEEAQAFIQKYFQRYPKVKAWIEKTLREGRTRGYVETLFGRRRYVPDLNARVKGKREAAERMAFNMPVQGTAADLMKLAMVRLFPQLREVGARMLLQVHDELLLEAPKERAEEVAALAKEVMEGVWPLAVPLEVEVGIGEDWLAAKG

SEQ ID NO: 6255 - DNA, 2523 bp, synthetic construct
  misc_feature 1..2523: note = Variant of DNA polymerase I from Thermus sp. strain 2.9
  source 1..2523: mol_type = other DNA
atgcaccatcatcatcatcatggcggtagcggcgtgttaccggtgttcgagcctaaaggtcgcgtgcttctggttgatggccatcatctcgcgtatcgtaacttctttgccctgaaaggattaaccaccagcctgggcgagccggtacagggtgtctacggctttgcaaagtcgctcctgaaagctctgaaagaagacggtgatgtggtgattgttgtctttgatgcgaaagcgccaagttttcgccacgaagcgtacgaagcttacaaagccgggcgtgctccaacgccggaagactttcctcgccaattggcgcttatgaaggaattagtggatttgcttggcctcgaacgcttggaagttcccggtttcgaggcagacgacgtattagcgactctcgcaaagaaagccgaacgtgagggctatgaagtccagatcttgacagcagatcgcgatcttttccagcttttatctccgcgcatctcggtgttacacccggaagggcatcgtatcaccccggaatggctctgggagaaatatggtttgcgtcccgaacaatgggtggattttcgcgccttagcaggcgatccgagcgacaatattccgggagttaaaggtatcggcgagaagacggcgctcaagctccttaaagaatgggggtcgttggagaacttgcttaagaatttagatcaggtcaaaccagagtcagtgcgtgagaagattcttgctcacctcgaagacctcaaattaagccgcgaattgtcccgtgtacgcaccgatttgccgctcgaagttgatttcggtcgccgccgcgaacctgactgggagggtcttaaagcgtttttagagcgtcttgaatttggttcgctcttgcatgaattcggccttttagaaagcccgttactggccgaagaagcaccttggccaccgcccgagggcgcgtttttaggttaccgtttgagtcgcccggaaccgatgtgggccgaattactggctcttgcagcgtctgcccagggacgtgtgtatcgcgcggaagaccctcatggtgcgctccgcggcctcttcgaagtccgtggactccttgccaaagacttagctgttgttgcattgcgcgaaggtcttgatttacctccgactgatgatccaatgcttcttgcgtacctcttggacccgtcaaacacgacgcccgaaggcgtagcccgtcgttacggcggcgagtggaccgaagatgcagcgaaacgcgcgttattggccgaacgtttgcacgaaaatttattaggacgtttgcaaggcgaggaacgtctcctctggctttacgaagaagtggagaaaccattgagtcgcgtgctcgcgcatatggaagctaccggtgtcaaattagacgtggcgtatttggagaatctcagccttgaagttgctgcccacatgcgccgcttggaggaagaagtattccgtttagcaggccgttcctttcgccttaactctcgcgatcagttagaacgtgtgttgttcgatgaacttggtctccctcctatcggcaagacagagaagaccggtaaacgtagcacttcagcggcggttttagaagctcttcgcgaagtccatcccattgtggacaagatcttgcagtaccgcgaaatggcgaaattgaaaggcacctatattgaccgtcttccggcattagtccacccgaaaacgggacgcctccatacccgcttcaaccaaacagccacggcgaccggtcgtttgtcctcctctgatccaaaccttcagaatattccagtacgtaccccattgggccagaagatccgccgtgcgtttgtagctgaggagggttggcgtttagtggccctcgattatcgtcaaattgaattacgtgtccttgcccatctttctggcgatgagaacctcatccgcgtgtttcaggaaggcaaagacattcacactcaaacggcaagctggatgtttggattatcagctgaagcgatcgatcctttgatgcgtcgtgcagcgaagaccatcaatttcggtgttctctacggtatgagtgcctttcgtttgtcgcaggaattaggcattcccacggaagaagctcaggcgttcattcagaaatactttcaaagctatcccaaagttaaagcatggatcgagaagactctccgtgaaggccgcacacgtggttacgtagagaccttatttggacgtcgccgctatgttcccgatttaaacgctcgcgtgaaaggcaagcgtgaagccgccgaacgcatggcgttcaacatgcctgtacagggcacggcagctgacctcatgaaacttgcaatggtgcgcctttttccacaattgcgtgaagttggtgcccgcatgctcttgcaggtccacgatgaactcttgttagaagcgccaaaagagcgtgcggaagaggtggcagccctcgcgaaagaagttatggaaggcgtgtggcccttagcggtgcctcttgaagtcgaagttggtattggcgaggattggctggctgccaaagga

SEQ ID NO: 6256 - protein, 841 aa, synthetic construct
  REGION 1..841: note = Variant of DNA polymerase I from Thermus sp. strain 2.9
MHHHHHHGGSGVLPVFEPKGRVLLVDGHHLAYRNFFALKGLTTSLGEPVQGVYGFAKSLLKALKEDGDVVIVVFDAKAPSFRHEAYEAYKAGRAPTPEDFPRQLALMKELVDLLGLERLEVPGFEADDVLATLAKKAEREGYEVQILTADRDLFQLLSPRISVLHPEGHRITPEWLWEKYGLRPEQWVDFRALAGDPSDNIPGVKGIGEKTALKLLKEWGSLENLLKNLDQVKPESVREKILAHLEDLKLSRELSRVRTDLPLEVDFGRRREPDWEGLKAFLERLEFGSLLHEFGLLESPLLAEEAPWPPPEGAFLGYRLSRPEPMWAELLALAASAQGRVYRAEDPHGALRGLFEVRGLLAKDLAVVALREGLDLPPTDDPMLLAYLLDPSNTTPEGVARRYGGEWTEDAAKRALLAERLHENLLGRLQGEERLLWLYEEVEKPLSRVLAHMEATGVKLDVAYLENLSLEVAAHMRRLEEEVFRLAGRSFRLNSRDQLERVLFDELGLPPIGKTEKTGKRSTSAAVLEALREVHPIVDKILQYREMAKLKGTYIDRLPALVHPKTGRLHTRFNQTATATGRLSSSDPNLQNIPVRTPLGQKIRRAFVAEEGWRLVALDYRQIELRVLAHLSGDENLIRVFQEGKDIHTQTASWMFGLSAEAIDPLMRRAAKTINFGVLYGMSAFRLSQELGIPTEEAQAFIQKYFQSYPKVKAWIEKTLREGRTRGYVETLFGRRRYVPDLNARVKGKREAAERMAFNMPVQGTAADLMKLAMVRLFPQLREVGARMLLQVHDELLLEAPKERAEEVAALAKEVMEGVWPLAVPLEVEVGIGEDWLAAKG

SEQ ID NO: 6257 - DNA, 2523 bp, synthetic construct
  misc_feature 1..2523: note = Variant of DNA polymerase I from Thermus sp. strain 2.9
  source 1..2523: mol_type = other DNA
atgcaccatcatcatcatcatggcggtagcggcgtgttaccggtgttcgagcctaaaggtcgcgtgcttctggttgatggccatcatctcgcgtatcgtaacttctttgccctgaaaggattaaccaccagcctgggcgagccggtacagggtgtctacggctttgcaaagtcgctcctgaaagctctgaaagaagacggtgatgtggtgattgttgtctttgatgcgaaagcgccaagttttcgccacgaagcgtacgaagcttacaaagccgggcgtgctccaacgccggaagactttcctcgccaattggcgcttatgaaggaattagtggatttgcttggcctcgaacgcttggaagttcccggtttcgaggcagacgacgtattagcgactctcgcaaagaaagccgaacgtgagggctatgaagtccagatcttgacagcagatcgcgatcttttccagcttttatctccgcgcatctcggtgttacacccggaagggcatcgtatcaccccggaatggctctgggagaaatatggtttgcgtcccgaacaatgggtggattttcgcgccttagcaggcgatccgagcgacaatattccgggagttaaaggtatcggcgagaagacggcgctcaagctccttaaagaatgggggtcgttggagaacttgcttaagaatttagatcaggtcaaaccagagtcagtgcgtgagaagattcttgctcacctcgaagacctcaaattaagccgcgaattgtcccgtgtacgcaccgatttgccgctcgaagttgatttcggtcgccgccgcgaacctgactgggagggtcttaaagcgtttttagagcgtcttgaatttggttcgctcttgcatgaattcggccttttagaaagcccgttactggccgaagaagcaccttggccaccgcccgagggcgcgtttttaggttaccgtttgagtcgcccggaaccgatgtgggccgaattactggctcttgcagcgtctgcccagggacgtgtgtatcgcgcggaagaccctcatggtgcgctccgcggcctcttcgaagtccgtggactccttgccaaagacttagctgttgttgcattgcgcgaaggtcttgatttacctccgactgatgatccaatgcttcttgcgtacctcttggacccgtcaaacacgacgcccgaaggcgtagcccgtcgttacggcggcgagtggaccgaagatgcagcgaaacgcgcgttattggccgaacgtttgcacgaaaatttattaggacgtttgcaaggcgaggaacgtctcctctggctttacgaagaagtggagaaaccattgagtcgcgtgctcgcgcatatggaagctaccggtgtcaaattagacgtggcgtatttggagaatctcagccttgaagttgctgcccacatgcgccgcttggaggaagaagtattccgtttagcaggccgttcctttcgccttaactctcgcgatcagttagaacgtgtgttgttcgatgaacttggtctccctcctatcggcaagacagagaagaccggtaaacgtagcacttcagcggcggttttagaagctcttcgcgaagtccatcccattgtggacaagatcttgcagtaccgcgaaatggcgaaattgaaaggcacctatattgaccgtcttccggcattagtccacccgaaaacgggacgcctccatacccgcttcaaccaaacagccacggcgaccggtcgtttgtcctcctctgatccaaaccttcagaatattccagtacgtaccccattgggccagaagatccgccgtgcgtttgtagctgaggagggttggcgtttagtggccctcgattatcgtcaaattgaattacgtgtccttgcccatctttctggcgatgagaacctcatccgcgtgtttcaggaaggcaaagacattcacactcaaacggcaagctggatgtttggattatcagctgaagcgatcgatcctttgatgcgtcgtgcagcgaagaccatcaatttcggtgttctctacggtatgagtgcctttcgtttgtcgcaggaattaggcattccctatgaagaagctcaggcgttcattcagaaatactttcaaagctatcccaaagttaaactgtggatcgagaagactctccgtgaaggccgcacacgtggttacgtagagaccttatttggacgtcgccgctatgttcccgatttaaacgctcgcgtgaaaggcaagcgtgaagccgccgaacgcatggcgttcaacatgcctgtacagggcacggcagctgacctcatgaaacttgcaatggtgcgcctttttccacaattgcgtgaagttggtgcccgcatgctcttgcaggtccacgatgaactcttgttagaagcgccaaaagagcgtgcggaagaggtggcagccctcgcgaaagaagttatggaaggcgtgtggcccttagcggtgcctcttgaagtcgaagttggtattggcgaggattggctggctgccaaagga

SEQ ID NO: 6258 - protein, 841 aa, synthetic construct
  REGION 1..841: note = Variant of DNA polymerase I from Thermus sp. strain 2.9
MHHHHHHGGSGVLPVFEPKGRVLLVDGHHLAYRNFFALKGLTTSLGEPVQGVYGFAKSLLKALKEDGDVVIVVFDAKAPSFRHEAYEAYKAGRAPTPEDFPRQLALMKELVDLLGLERLEVPGFEADDVLATLAKKAEREGYEVQILTADRDLFQLLSPRISVLHPEGHRITPEWLWEKYGLRPEQWVDFRALAGDPSDNIPGVKGIGEKTALKLLKEWGSLENLLKNLDQVKPESVREKILAHLEDLKLSRELSRVRTDLPLEVDFGRRREPDWEGLKAFLERLEFGSLLHEFGLLESPLLAEEAPWPPPEGAFLGYRLSRPEPMWAELLALAASAQGRVYRAEDPHGALRGLFEVRGLLAKDLAVVALREGLDLPPTDDPMLLAYLLDPSNTTPEGVARRYGGEWTEDAAKRALLAERLHENLLGRLQGEERLLWLYEEVEKPLSRVLAHMEATGVKLDVAYLENLSLEVAAHMRRLEEEVFRLAGRSFRLNSRDQLERVLFDELGLPPIGKTEKTGKRSTSAAVLEALREVHPIVDKILQYREMAKLKGTYIDRLPALVHPKTGRLHTRFNQTATATGRLSSSDPNLQNIPVRTPLGQKIRRAFVAEEGWRLVALDYRQIELRVLAHLSGDENLIRVFQEGKDIHTQTASWMFGLSAEAIDPLMRRAAKTINFGVLYGMSAFRLSQELGIPYEEAQAFIQKYFQSYPKVKLWIEKTLREGRTRGYVETLFGRRRYVPDLNARVKGKREAAERMAFNMPVQGTAADLMKLAMVRLFPQLREVGARMLLQVHDELLLEAPKERAEEVAALAKEVMEGVWPLAVPLEVEVGIGEDWLAAKG

SEQ ID NO: 6259 - DNA, 2523 bp, synthetic construct
  misc_feature 1..2523: note = Variant of DNA polymerase I from Thermus sp. strain 2.9
  source 1..2523: mol_type = other DNA
atgcaccatcatcatcatcatggcggtagcggcgtgttaccggtgttcgagcctaaaggtcgcgtgcttctggttgatggccatcatctcgcgtatcgtaacttctttgccctgaaaggattaaccaccagcctgggcgagccggtacagggtgtctacggctttgcaaagtcgctcctgaaagctctgaaagaagacggtgatgtggtgattgttgtctttgatgcgaaagcgccaagttttcgccacgaagcgtacgaagcttacaaagccgggcgtgctccaacgccggaagactttcctcgccaattggcgcttatgaaggaattagtggatttgcttggcctcgaacgcttggaagttcccggtttcgaggcagacgacgtattagcgactctcgcaaagaaagccgaacgtgagggctatgaagtccagatcttgacagcagatcgcgatcttttccagcttttatctccgcgcatctcggtgttacacccggaagggcatcgtatcaccccggaatggctctgggagaaatatggtttgcgtcccgaacaatgggtggattttcgcgccttagcaggcgatccgagcgacaatattccgggagttaaaggtatcggcgagaagacggcgctcaagctccttaaagaatgggggtcgttggagaacttgcttaagaatttagatcaggtcaaaccagagtcagtgcgtgagaagattcttgctcacctcgaagacctcaaattaagccgcgaattgtcccgtgtacgcaccgatttgccgctcgaagttgatttcggtcgccgccgcgaacctgactgggagggtcttaaagcgtttttagagcgtcttgaatttggttcgctcttgcatgaattcggccttttagaaagcccgttactggccgaagaagcaccttggccaccgcccgagggcgcgtttttaggttaccgtttgagtcgcccggaaccgatgtgggccgaattactggctcttgcagcgtctgcccagggacgtgtgtatcgcgcggaagaccctcatggtgcgctccgcggcctcttcgaagtccgtggactccttgccaaagacttagctgttgttgcattgcgcgaaggtcttgatttacctccgactgatgatccaatgcttcttgcgtacctcttggacccgtcaaacacgacgcccgaaggcgtagcccgtcgttacacgggcgagtggaccgaagatgcagcgaaacgcgcgttattggccgaacgtttgcacgaaaatttattaggacgtttgcaaggcgaggaacgtctcctctggctttacgaagaagtggagaaaccattgagtcgcgtgctcgcgcatatggaagctaccggtgtcaaattagacgtggcgtatttggagaatctcagccttgaagttgctgcccacatgcgccgcttggaggaagaagtattccgtttagcaggccgttcctttcgccttaactctcgcgatcagttagaacgtgtgttgttcgatgaacttggtctccctcctatcggcaagacagagaagaccggtaaacgtagcacttcagcggcggttttagaagctcttcgcgaagtccatcccattgtggacaagatcttgcagtaccgcgaaatggcgaaattgaaaggcacctatattgaccgtcttccggcattagtccacccgaaaacgggacgcctccatacccgcttcaaccaaacagccacggcgaccggtcgtttgtcctcctctgatccaaaccttcagaatattccagtacgtaccccattgggccagaagatccgccgtgcgtttgtagctgaggagggttggcgtttagtggccctcgattatcgtcaaattgaattacgtgtccttgcccatctttctggcgatgagaacctcatccgcgtgtttcaggaaggcaaagacattcacactcaaacggcaagctggatgtttggattatcagctgaagcgatcgatcctttgatgcgtcgtgcagcgaagaccatcaatttcggtgttctctacggtatgagtgcctttcgtttgtcgcaggaattaggcattccctatgaagaagctcaggcgttcattcagaaatactttcaaagctatcccaaagttaaagcatggatcgagaagactctccgtgaaggccgcacacgtggttacgtagagaccttatttggacgtcgccgctatgttcccgatttaaacgctcgcgtgaaaggcaagcgtgaagccgccgaacgcatggcgttcaacatgcctgtacagggcacggcagctgacctcatgaaacttgcaatggtgcgcctttttccacaattgcgtgaagttggtgcccgcatgctcttgcaggtccacgatgaactcttgttagaagcgccaaaagagcgtgcggaagaggtggcagccctcgcgaaagaagttatggaaggcgtgtggcccttagcggtgcctcttgaagtcgaagttggtattggcgaggattggctggctgccaaagga

SEQ ID NO: 6260 - protein, 841 aa, synthetic construct
  REGION 1..841: note = Variant of DNA polymerase I from Thermus sp. strain 2.9
MHHHHHHGGSGVLPVFEPKGRVLLVDGHHLAYRNFFALKGLTTSLGEPVQGVYGFAKSLLKALKEDGDVVIVVFDAKAPSFRHEAYEAYKAGRAPTPEDFPRQLALMKELVDLLGLERLEVPGFEADDVLATLAKKAEREGYEVQILTADRDLFQLLSPRISVLHPEGHRITPEWLWEKYGLRPEQWVDFRALAGDPSDNIPGVKGIGEKTALKLLKEWGSLENLLKNLDQVKPESVREKILAHLEDLKLSRELSRVRTDLPLEVDFGRRREPDWEGLKAFLERLEFGSLLHEFGLLESPLLAEEAPWPPPEGAFLGYRLSRPEPMWAELLALAASAQGRVYRAEDPHGALRGLFEVRGLLAKDLAVVALREGLDLPPTDDPMLLAYLLDPSNTTPEGVARRYTGEWTEDAAKRALLAERLHENLLGRLQGEERLLWLYEEVEKPLSRVLAHMEATGVKLDVAYLENLSLEVAAHMRRLEEEVFRLAGRSFRLNSRDQLERVLFDELGLPPIGKTEKTGKRSTSAAVLEALREVHPIVDKILQYREMAKLKGTYIDRLPALVHPKTGRLHTRFNQTATATGRLSSSDPNLQNIPVRTPLGQKIRRAFVAEEGWRLVALDYRQIELRVLAHLSGDENLIRVFQEGKDIHTQTASWMFGLSAEAIDPLMRRAAKTINFGVLYGMSAFRLSQELGIPYEEAQAFIQKYFQSYPKVKAWIEKTLREGRTRGYVETLFGRRRYVPDLNARVKGKREAAERMAFNMPVQGTAADLMKLAMVRLFPQLREVGARMLLQVHDELLLEAPKERAEEVAALAKEVMEGVWPLAVPLEVEVGIGEDWLAAKG

SEQ ID NO: 6261 - DNA, 2523 bp, synthetic construct
  misc_feature 1..2523: note = Variant of DNA polymerase I from Thermus sp. strain 2.9
  source 1..2523: mol_type = other DNA
atgcaccatcatcatcatcatggcggtagcggcgtgttaccggtgttcgagcctaaaggtcgcgtgcttctggttgatggccatcatctcgcgtatcgtaacttctttgccctgaaaggattaaccaccagcctgggcgagccggtacagggtgtctacggctttgcaaagtcgctcctgaaagctctgaaagaagacggtgatgtggtgattgttgtctttgatgcgaaagcgccaagttttcgccacgaagcgtacgaagcttacaaagccgggcgtgctccaacgccggaagactttcctcgccaattggcgcttatgaaggaattagtggatttgcttggcctcgaacgcttggaagttcccggtttcgaggcagacgacgtattagcgactctcgcaaagaaagccgaacgtgagggctatgaagtccagatcttgacagcagatcgcgatcttttccagcttttatctccgcgcatctcggtgttacacccggaagggcatcgtatcaccccggaatggctctgggagaaatatggtttgcgtcccgaacaatgggtggattttcgcgccttagcaggcgatccgagcgacaatattccgggagttaaaggtatcggcgagaagacggcgctcaagctccttaaagaatgggggtcgttggagaacttgcttaagaatttagatcaggtcaaaccagagtcagtgcgtgagaagattcttgctcacctcgaagacctcaaattaagccgcgaattgtcccgtgtacgcaccgatttgccgctcgaagttgatttcggtcgccgccgcgaacctgactgggagggtcttaaagcgtttttagagcgtcttgaatttggttcgctcttgcatgaattcggccttttagaaagcccgttactggccgaagaagcaccttggccaccgcccgagggcgcgtttttaggttaccgtttgagtcgcccggaaccgatgtgggccgaattactgtgtcttgcagcgtctgcccagggacgtgtgtatcgcgcggaagaccctcatggtgcgctccgcggcctcttcgaagtccgtggactccttgccaaagacttagctgttgttgcattgcgcgaaggtcttgatttacctccgactgatgatccaatgcttcttgcgtacctcttggacccgtcaaacacgacgcccgaaggcgtagcccgtcgttacggcggcgagtggaccgaagatgcagcgaaacgcgcgttattggccgaacgtttgcacgaaaatttattaggacgtttgcaaggcgaggaacgtctcctctggctttacgaagaagtggagaaaccattgagtcgcgtgctcgcgcatatggaagctaccggtgtcaaattagacgtggcgtatttggagaatctcagccttgaagttgctgcccacatgcgccgcttggaggaagaagtattccgtttagcaggccgttcctttcgccttaactctcgcgatcagttagaacgtgtgttgttcgatgaacttggtctccctcctatcggcaagacagagaagaccggtaaacgtagcacttcagcggcggttttagaagctcttcgcgaagtccatcccattgtggacaagatcttgcagtaccgcgaaatggcgaaattgaaaggcacctatattgaccgtcttccggcattagtccacccgaaaacgggacgcctccatacccgcttcaaccaaacagccacggcgaccggtcgtttgtcctcctctgatccaaaccttcagaatattccagtacgtaccccattgggccagaagatccgccgtgcgtttgtagctgaggagggttggcgtttagtggccctcgattatcgtcaaattgaattacgtgtccttgcccatctttctggcgatgagaacctcatccgcgtgtttcaggaaggcaaagacattcacactcaaacggcaagctggatgtttggattatcagctgaagcgatcgatcctttgatgcgtcgtgcagcgaagaccatcaatttcggtgttctctacggtatgagtgcctttcgtttgtcgcaggaattaggcattccctatgaagaagctcaggcgttcattcagaaatactttcaaagctatcccaaagttaaagcatggatcgagaagactctccgtgaaggccgcacacgtggttacgtagagaccttatttggacgtcgccgctatgttcccgatttaaacgctcgcgtgaaaggcaagcgtgaagccgccgaacgcatggcgttcaacatgcctgtacagggcacggcagctgacctcatgaaacttgcaatggtgcgcctttttccacaattgcgtgaagttggtgcccgcatgctcttgcaggtccacgatgaactcttgttagaagcgccaaaagagcgtgcggaagaggtggcagccctcgcgaaagaagttatggaaggcgtgtggcccttagcggtgcctcttgaagtcgaagttggtattggcgaggattggctggctgccaaagga

SEQ ID NO: 6262 - protein, 841 aa, synthetic construct
  REGION 1..841: note = Variant of DNA polymerase I from Thermus sp. strain 2.9
MHHHHHHGGSGVLPVFEPKGRVLLVDGHHLAYRNFFALKGLTTSLGEPVQGVYGFAKSLLKALKEDGDVVIVVFDAKAPSFRHEAYEAYKAGRAPTPEDFPRQLALMKELVDLLGLERLEVPGFEADDVLATLAKKAEREGYEVQILTADRDLFQLLSPRISVLHPEGHRITPEWLWEKYGLRPEQWVDFRALAGDPSDNIPGVKGIGEKTALKLLKEWGSLENLLKNLDQVKPESVREKILAHLEDLKLSRELSRVRTDLPLEVDFGRRREPDWEGLKAFLERLEFGSLLHEFGLLESPLLAEEAPWPPPEGAFLGYRLSRPEPMWAELLCLAASAQGRVYRAEDPHGALRGLFEVRGLLAKDLAVVALREGLDLPPTDDPMLLAYLLDPSNTTPEGVARRYGGEWTEDAAKRALLAERLHENLLGRLQGEERLLWLYEEVEKPLSRVLAHMEATGVKLDVAYLENLSLEVAAHMRRLEEEVFRLAGRSFRLNSRDQLERVLFDELGLPPIGKTEKTGKRSTSAAVLEALREVHPIVDKILQYREMAKLKGTYIDRLPALVHPKTGRLHTRFNQTATATGRLSSSDPNLQNIPVRTPLGQKIRRAFVAEEGWRLVALDYRQIELRVLAHLSGDENLIRVFQEGKDIHTQTASWMFGLSAEAIDPLMRRAAKTINFGVLYGMSAFRLSQELGIPYEEAQAFIQKYFQSYPKVKAWIEKTLREGRTRGYVETLFGRRRYVPDLNARVKGKREAAERMAFNMPVQGTAADLMKLAMVRLFPQLREVGARMLLQVHDELLLEAPKERAEEVAALAKEVMEGVWPLAVPLEVEVGIGEDWLAAKG

SEQ ID NO: 6263 - DNA, 2523 bp, synthetic construct
  misc_feature 1..2523: note = Variant of DNA polymerase I from Thermus sp. strain 2.9
  source 1..2523: mol_type = other DNA
atgcaccatcatcatcatcatggcggtagcggcgtgttaccggtgttcgagcctaaaggtcgcgtgcttctggttgatggccatcatctcgcgtatcgtaacttctttgccctgaaaggattaaccaccagcctgggcgagccggtacagggtgtctacggctttgcaaagtcgctcctgaaagctctgaaagaagacggtgatgtggtgattgttgtctttgatgcgaaagcgccaagttttcgccacgaagcgtacgaagcttacaaagccgggcgtgctccaacgccggaagactttcctcgccaattggcgcttatgaaggaattagtggatttgcttggcctcgaacgcttggaagttcccggtttcgaggcagacgacgtattagcgactctcgcaaagaaagccgaacgtgagggctatgaagtccagatcttgacagcagatcgcgatcttttccagcttttatctccgcgcatctcggtgttacacccggaagggcatcgtatcaccccggaatggctctgggagaaatatggtttgcgtcccgaacaatgggtggattttcgcgccttagcaggcgatccgagcgacaatattccgggagttaaaggtatcggcgagaagacggcgctcaagctccttaaagaatgggggtcgttggagaacttgcttaagaatttagatcaggtcaaaccagagtcagtgcgtgagaagattcttgctcacctcgaagacctcaaattaagccgcgaattgtcccgtgtacgcaccgatttgccgctcgaagttgatttcggtcgccgccgcgaacctgactgggagggtcttaaagcgtttttagagcgtcttgaatttggttcgctcttgcatgaattcggccttttagaaagcccgttactggccgaagaagcaccttggccaccgcccgagggcgcgtttttaggttaccgtttgagtcgcccggaaccgatgtgggccgaattactggctcttgcagcgtctgcccagggacgtgtgtatcgcgcggaagaccctcatggtgcgctccgcggcctcttcgaagtccgtggactccttgccaaagacttagctgttgttgcattgcgcgaaggtcttgatttacctccgactgatgatccaatgcttcttgcgtacctcttggacccgtcaaacacgacgcccgaaggcgtagcccgtcgttacggcggcgagtggaccgaagatgcagcgaaacgcgcgttattggccgaacgtttgcacgaaaatttattaggacgtttgcaaggcgaggaacgtctcctctggctttacgaagaagtggagaaaccattgagtcgcgtgctcgcgcatatggaagctaccggtgtcaaattagacgtggcgtatttggagaatctcagccttgaagttgctgcccacatgcgccgcttggaggaagaagtattccgtttagcaggccgttcctttcgccttaactctcgcgatcagttagaacgtgtgttgttcgatgaacttggtctcccttatatcggcaagacagagaagaccggtaaacgtagcacttcagcggcggttttagaagctcttcgcgaagtccatcccattgtggacaagatcttgcagtaccgcgaaatggcgaaattgaaaggcacctatattgaccgtcttccggcattagtccacccgaaaacgggacgcctccatacccgcttcaaccaaacagccacggcgaccggtcgtttgtcctcctctgatccaaaccttcagaatattccagtacgtaccccattgggccagaagatccgccgtgcgtttgtagctgaggagggttggcgtttagtggccctcgattatcgtcaaattgaattacgtgtccttgcccatctttctggcgatgagaacctcatccgcgtgtttcaggaaggcaaagacattcacactcaaacggcaagctggatgtttggattatcagctgaagcgatcgatcctttgatgcgtcgtgcagcgaagaccatcaatttcggtgttctctacggtatgagtgcctttcgtttgtcgcaggaattaggcattccctatgaagaagctcaggcgttcattcagaaatactttcaaagctatcccaaagttaaagcatggatcgagaagactctccgtgaaggccgcacacgtggttacgtagagaccttatttggacgtcgccgctatgttcccgatttaaacgctcgcgtgaaaggcaagcgtgaagccgccgaacgcatggcgttcaacatgcctgtacagggcacggcagctgacctcatgaaacttgcaatggtgcgcctttttccacaattgcgtgaagttggtgcccgcatgctcttgcaggtccacgatgaactcttgttagaagcgccaaaagagcgtgcggaagaggtggcagccctcgcgaaagaagttatggaaggcgtgtggcccttagcggtgcctcttgaagtcgaagttggtattggcgaggattggctggctgccaaagga

SEQ ID NO: 6264 - protein, 841 aa, synthetic construct
  REGION 1..841: note = Variant of DNA polymerase I from Thermus sp. strain 2.9
MHHHHHHGGSGVLPVFEPKGRVLLVDGHHLAYRNFFALKGLTTSLGEPVQGVYGFAKSLLKALKEDGDVVIVVFDAKAPSFRHEAYEAYKAGRAPTPEDFPRQLALMKELVDLLGLERLEVPGFEADDVLATLAKKAEREGYEVQILTADRDLFQLLSPRISVLHPEGHRITPEWLWEKYGLRPEQWVDFRALAGDPSDNIPGVKGIGEKTALKLLKEWGSLENLLKNLDQVKPESVREKILAHLEDLKLSRELSRVRTDLPLEVDFGRRREPDWEGLKAFLERLEFGSLLHEFGLLESPLLAEEAPWPPPEGAFLGYRLSRPEPMWAELLALAASAQGRVYRAEDPHGALRGLFEVRGLLAKDLAVVALREGLDLPPTDDPMLLAYLLDPSNTTPEGVARRYGGEWTEDAAKRALLAERLHENLLGRLQGEERLLWLYEEVEKPLSRVLAHMEATGVKLDVAYLENLSLEVAAHMRRLEEEVFRLAGRSFRLNSRDQLERVLFDELGLPYIGKTEKTGKRSTSAAVLEALREVHPIVDKILQYREMAKLKGTYIDRLPALVHPKTGRLHTRFNQTATATGRLSSSDPNLQNIPVRTPLGQKIRRAFVAEEGWRLVALDYRQIELRVLAHLSGDENLIRVFQEGKDIHTQTASWMFGLSAEAIDPLMRRAAKTINFGVLYGMSAFRLSQELGIPYEEAQAFIQKYFQSYPKVKAWIEKTLREGRTRGYVETLFGRRRYVPDLNARVKGKREAAERMAFNMPVQGTAADLMKLAMVRLFPQLREVGARMLLQVHDELLLEAPKERAEEVAALAKEVMEGVWPLAVPLEVEVGIGEDWLAAKG

SEQ ID NO: 6265 - DNA, 2523 bp, synthetic construct
  misc_feature 1..2523: note = Variant of DNA polymerase I from Thermus sp. strain 2.9
  source 1..2523: mol_type = other DNA
atgcaccatcatcatcatcatggcggtagcggcgtgttaccggtgttcgagcctaaaggtcgcgtgcttctggttgatggccatcatctcgcgtatcgtaacttctttgccctgaaaggattaaccaccagcctgggcgagccggtacagggtgtctacggctttgcaaagtcgctcctgaaagctctgaaagaagacggtgatgtggtgattgttgtctttgatgcgaaagcgccaagttttcgccacgaagcgtacgaagcttacaaagccgggcgtgctccaacgccggaagactttcctcgccaattggcgcttatgaaggaattagtggatttgcttggcctcgaacgcttggaagttcccggtttcgaggcagacgacgtattagcgactctcgcaaagaaagccgaacgtgagggctatgaagtccagatcttgacagcagatcgcgatcttttccagcttttatctccgcgcatctcggtgttacacccggaagggcatcgtatcaccccggaatggctctgggagaaatatggtttgcgtcccgaacaatgggtggattttcgcgccttagcaggcgatccgagcgacaatattccgggagttaaaggtatcggcgagaagacggcgctcaagctccttaaagaatgggggtcgttggagaacttgcttaagaatttagatcaggtcaaaccagagtcagtgcgtgagaagattcttgctcacctcgaagacctcaaattaagccgcgaattgtcccgtgtacgcaccgatttgccgctcgaagttgatttcggtcgccgccgcgaacctgactgggagggtcttaaagcgtttttagagcgtcttgaatttggttcgctcttgcatgaattcggccttttagaaagcccgttactggccgaagaagcaccttggccaccgcccgagggcgcgtttttaggttaccgtttgagtcgcccggaaccgatgtgggccgaattactggctcttgcagcgtctgcccagggacgtgtgtatcgcgcggaagaccctcatggtgcgctccgcggcctcttcgaagtccgtggactccttgccaaagacttagctgttgttgcattgcgcgaaggtcttgatttacctccgactgatgatccaatgcttcttgcgtacctcttggacccgtcaaacacgacgcccgaaggcgtagcccgtcgttacggcggcgagtggaccgaagatgcagcgaaacgcgcgttattggccgaacgtttgcacgaaaatttattaggacgtttgcaaggcgaggaacgtctcctctggctttacgaagaagtggagaaaccattgagtcgcgtgctcgcgcatatggaagctaccggtgtcaaattagacgtggcgtatttggagaatctcagccttgaagttgctgcccacatgcgccgcttggaggaagaagtattccgtttagcaggccgttcctttcgccttaactctcgcgatcagttagaacgtgtgttgttcgatgaacttggtctccctcctatcggcaagacagagaagaccggtaaacgtagcacttcagcggcggttttagaagctcttcgcgaagtccatcccattgtggacaagatcttgcagtaccgcgaaatggcgaaattgaaaggcacctatattgaccgtcttccggcattagtccacccgaaaacgggacgcctccatacccgcttcaaccaaacagccacggcgaccggtcgtttgtcctcctctgatccaaaccttcagaatattccagtacgtaccccattgggccagaagatccgccgtgcgtttgtagctgaggagggttggcgtttagtggccctcgattatcgtcaaattgaattacgtgtccttgcccatctttctggcgatgagaacctcatccgcgtgtttcaggaaggcaaagacattcacactcaaacggcaagctggatgtttggattatcagctgaagcgatcgatcctttgatgcgtcgtgcagcgaagaccatcaatttcggtgttctctacggtatgagtgcctttcgtttgtcgcaggaattaggcattccctatgaagaagctcaggcgttcattcagaaatactttcaaagctatcccaaagttaaagcatggatcgagaagactctccgtgaaggccgcacacgtggttacgtagagaccttatttggacgtcgccgctatgttcccgatttaaacgctcgcgtgaaaggcaagcgtgaagccgccgaacgcatggcgttcaacatgcctgtacagggcacggcagctgacctcatgaaacttgcaatggtgcgcctttttccacaattgcgtgaagttggtgcccgcatgctcttgcatgtccacgatgaactcttgttagaagcgccaaaagagcgtgcggaagaggtggcagccctcgcgaaagaagttatggaaggcgtgtggcccttagcggtgcctcttgaagtcgaagttggtattggcgaggattggctggctgccaaagga

SEQ ID NO: 6266 - protein, 841 aa, synthetic construct
  REGION 1..841: note = Variant of DNA polymerase I from Thermus sp. strain 2.9
MHHHHHHGGSGVLPVFEPKGRVLLVDGHHLAYRNFFALKGLTTSLGEPVQGVYGFAKSLLKALKEDGDVVIVVFDAKAPSFRHEAYEAYKAGRAPTPEDFPRQLALMKELVDLLGLERLEVPGFEADDVLATLAKKAEREGYEVQILTADRDLFQLLSPRISVLHPEGHRITPEWLWEKYGLRPEQWVDFRALAGDPSDNIPGVKGIGEKTALKLLKEWGSLENLLKNLDQVKPESVREKILAHLEDLKLSRELSRVRTDLPLEVDFGRRREPDWEGLKAFLERLEFGSLLHEFGLLESPLLAEEAPWPPPEGAFLGYRLSRPEPMWAELLALAASAQGRVYRAEDPHGALRGLFEVRGLLAKDLAVVALREGLDLPPTDDPMLLAYLLDPSNTTPEGVARRYGGEWTEDAAKRALLAERLHENLLGRLQGEERLLWLYEEVEKPLSRVLAHMEATGVKLDVAYLENLSLEVAAHMRRLEEEVFRLAGRSFRLNSRDQLERVLFDELGLPPIGKTEKTGKRSTSAAVLEALREVHPIVDKILQYREMAKLKGTYIDRLPALVHPKTGRLHTRFNQTATATGRLSSSDPNLQNIPVRTPLGQKIRRAFVAEEGWRLVALDYRQIELRVLAHLSGDENLIRVFQEGKDIHTQTASWMFGLSAEAIDPLMRRAAKTINFGVLYGMSAFRLSQELGIPYEEAQAFIQKYFQSYPKVKAWIEKTLREGRTRGYVETLFGRRRYVPDLNARVKGKREAAERMAFNMPVQGTAADLMKLAMVRLFPQLREVGARMLLHVHDELLLEAPKERAEEVAALAKEVMEGVWPLAVPLEVEVGIGEDWLAAKG

SEQ ID NO: 6267 - DNA, 2523 bp, synthetic construct
  misc_feature 1..2523: note = Variant of DNA polymerase I from Thermus sp. strain 2.9
  source 1..2523: mol_type = other DNA
atgcaccatcatcatcatcatggcggtagcggcgtgttaccggtgttcgagcctaaaggtcgcgtgcttctggttgatggccatcatctcgcgtatcgtaacttctttgccctgaaaggattaaccaccagcctgggcgagccggtacagggtgtctacggctttgcaaagtcgctcctgaaagctctgaaagaagacggtgatgtggtgattgttgtctttgatgcgaaagcgccaagttttcgccacgaagcgtacgaagcttacaaagccgggcgtgctccaacgccggaagactttcctcgccaattggcgcttatgaaggaattagtggatttgcttggcctcgaacgcttggaagttcccggtttcgaggcagacgacgtattagcgactctcgcaaagaaagccgaacgtgagggctatgaagtccagatcttgacagcagatcgcgatcttttccagcttttatctccgcgcatctcggtgttacacccggaagggcatcgtatcaccccggaatggctctgggagaaatatggtttgcgtcccgaacaatgggtggattttcgcgccttagcaggcgatccgagcgacaatattccgggagttaaaggtatcggcgagaagacggcgctcaagctccttaaagaatgggggtcgttggagaacttgcttaagaatttagatcaggtcaaaccagagtcagtgcgtgagaagattcttgctcacctcgaagacctcaaattaagccgcgaattgtcccgtgtacgcaccgatttgccgctcgaagttgatttcggtcgccgccgcgaacctgactgggagggtcttaaagcgtttttagagcgtcttgaatttggttcgctcttgcatgaattcggccttttagaaagcccgttactggccgaagaagcaccttggccaccgcccgagggcgcgtttttaggttaccgtttgagtcgcccggaaccgatgtgggccgaattactggctcttgcagcgtctgcccagggacgtgtgtatcgcgcggaagaccctcatggtgcgctccgcggcctcttcgaagtccgtggactccttgccaaagacttagctgttgttgcattgcgcgaaggtcttgatttacctccgactgatgatccaatgcttcttgcgtacctcttggacccgtcaaacacgacgcccgaaggcgtagcccgtcgttacggcggcgagtggaccgaagatgcagcgaaacgcgcgttattggccgaacgtttgcacgaaaatttattaggacgtttgcaaggcgaggaacgtctcctctggctttacgaagaagtggagaaaccattgagtcgcgtgctcgcgcatatggaagctaccggtgtcaaattagacgtggcgtatttggagaatctcagccttgaagttgctgcccacatgcgccgcttggaggaagaagtattccgtttagcaggccgttcctttcgccttaactctcgcgatcagttagaacgtgtgttgttcgatgaacttggtctccctcctatcggcaagacagagaagaccggtaaacgtagcacttcagcggcggttttagaagctcttcgcgaagtccatcccattgtggacaagatcttgcagtaccgcgaaatggcgaaattgaaaggcacctatattgaccgtcttccggcattagtccacccgaaaacgggacgcctccatacccgcttcaaccaaacagccacggcgaccggtcgtttgtcctcctctgatccaaaccttcagaatattccagtacgtaccccattgggccagtcgatccgccgtgcgtttgtagctgaggagggttggcgtttagtggccctcgattatcgtcaaattgaattacgtgtccttgcccatctttctggcgatgagaacctcatccgcgtgtttcaggaaggcaaagacattcacactcaaacggcaagctggatgtttggattatcagctgaagcgatcgatcctttgatgcgtcgtgcagcgaagaccatcaatttcggtgttctctacggtatgagtgcctttcgtttgtcgcaggaattaggcattccctatgaagaagctcaggcgttcattcagaaatactttcaaagctatcccaaagttaaagcatggatcgagaagactctccgtgaaggccgcacacgtggttacgtagagaccttatttggacgtcgccgctatgttcccgatttaaacgctcgcgtgaaaggcaagcgtgaagccgccgaacgcatggcgttcaacatgcctgtacagggcacggcagctgacctcatgaaacttgcaatggtgcgcctttttccacaattgcgtgaagttggtgcccgcatgctcttgcaggtccacgatgaactcttgttagaagcgccaaaagagcgtgcggaagaggtggcagccctcgcgaaagaagttatggaaggcgtgtggcccttagcggtgcctcttgaagtcgaagttggtattggcgaggattggctggctgccaaagga

SEQ ID NO: 6268 - protein, 841 aa, synthetic construct
  REGION 1..841: note = Variant of DNA polymerase I from Thermus sp. strain 2.9
MHHHHHHGGSGVLPVFEPKGRVLLVDGHHLAYRNFFALKGLTTSLGEPVQGVYGFAKSLLKALKEDGDVVIVVFDAKAPSFRHEAYEAYKAGRAPTPEDFPRQLALMKELVDLLGLERLEVPGFEADDVLATLAKKAEREGYEVQILTADRDLFQLLSPRISVLHPEGHRITPEWLWEKYGLRPEQWVDFRALAGDPSDNIPGVKGIGEKTALKLLKEWGSLENLLKNLDQVKPESVREKILAHLEDLKLSRELSRVRTDLPLEVDFGRRREPDWEGLKAFLERLEFGSLLHEFGLLESPLLAEEAPWPPPEGAFLGYRLSRPEPMWAELLALAASAQGRVYRAEDPHGALRGLFEVRGLLAKDLAVVALREGLDLPPTDDPMLLAYLLDPSNTTPEGVARRYGGEWTEDAAKRALLAERLHENLLGRLQGEERLLWLYEEVEKPLSRVLAHMEATGVKLDVAYLENLSLEVAAHMRRLEEEVFRLAGRSFRLNSRDQLERVLFDELGLPPIGKTEKTGKRSTSAAVLEALREVHPIVDKILQYREMAKLKGTYIDRLPALVHPKTGRLHTRFNQTATATGRLSSSDPNLQNIPVRTPLGQSIRRAFVAEEGWRLVALDYRQIELRVLAHLSGDENLIRVFQEGKDIHTQTASWMFGLSAEAIDPLMRRAAKTINFGVLYGMSAFRLSQELGIPYEEAQAFIQKYFQSYPKVKAWIEKTLREGRTRGYVETLFGRRRYVPDLNARVKGKREAAERMAFNMPVQGTAADLMKLAMVRLFPQLREVGARMLLQVHDELLLEAPKERAEEVAALAKEVMEGVWPLAVPLEVEVGIGEDWLAAKG

SEQ ID NO: 6269 - DNA, 2523 bp, synthetic construct
  misc_feature 1..2523: note = Variant of DNA polymerase I from Thermus sp. strain 2.9
  source 1..2523: mol_type = other DNA
atgcaccatcatcatcatcatggcggtagcggcgtgttaccggtgttcgagcctaaaggtcgcgtgcttctggttgatggccatcatctcgcgtatcgtaacttctttgccctgaaaggattaaccaccagcctgggcgagccggtacagggtgtctacggctttgcaaagtcgctcctgaaagctctgaaagaagacggtgatgtggtgattgttgtctttgatgcgaaagcgccaagttttcgccacgaagcgtacgaagcttacaaagccgggcgtgctccaacgccggaagactttcctcgccaattggcgcttatgaaggaattagtggatttgcttggcctcgaacgcttggaagttcccggtttcgaggcagacgacgtattagcgactctcgcaaagaaagccgaacgtgagggctatgaagtccagatcttgacagcagatcgcgatcttttccagcttttatctccgcgcatctcggtgttacacccggaagggcatcgtatcaccccggaatggctctgggagaaatatggtttgcgtcccgaacaatgggtggattttcgcgccttagcaggcgatccgagcgacaatattccgggagttaaaggtatcggcgagaagacggcgctcaagctccttaaagaatgggggtcgttggagaacttgcttaagaatttagatcaggtcaaaccagagtcagtgcgtgagaagattcttgctcacctcgaagacctcaaattaagccgcgaattgtcccgtgtacgcaccgatttgccgctcgaagttgatttcggtcgccgccgcgaacctgactgggagggtcttaaagcgtttttagagcgtcttgaatttggttcgctcttgcatgaattcggccttttagaaagcccgttactggccgaagaagcaccttggccaccgcccgagggcgcgtttttaggttaccgtttgagtcgcccggaaccgatgtgggccgaattactggctcttgcagcgtctgcccagggacgtgtgtatcgcgcggaagaccctcatggtgcgctccgcggcctcttcgaagtccgtggactccttgccaaagacttagctgttgttgcattgcgcgaaggtcttgatttacctccgactgatgatccaatgcttcttgcgtacctcttggacccgtcaaacacgacgcccgaaggcgtagcccgtcgttacggcggcgagtggaccgaagatgcacttaaacgcgcgttattggccgaacgtttgcacgaaaatttattaggacgtttgcaaggcgaggaacgtctcctctggctttacgaagaagtggagaaaccattgagtcgcgtgctcgcgcatatggaagctaccggtgtcaaattagacgtggcgtatttggagaatctcagccttgaagttgctgcccacatgcgccgcttggaggaagaagtattccgtttagcaggccgttcctttcgccttaactctcgcgatcagttagaacgtgtgttgttcgatgaacttggtctccctcctatcggcaagacagagaagaccggtaaacgtagcacttcagcggcggttttagaagctcttcgcgaagtccatcccattgtggacaagatcttgcagtaccgcgaaatggcgaaattgaaaggcacctatattgaccgtcttccggcattagtccacccgaaaacgggacgcctccatacccgcttcaaccaaacagccacggcgaccggtcgtttgtcctcctctgatccaaaccttcagaatattccagtacgtaccccattgggccagaagatccgccgtgcgtttgtagctgaggagggttggcgtttagtggccctcgattatcgtcaaattgaattacgtgtccttgcccatctttctggcgatgagaacctcatccgcgtgtttcaggaaggcaaagacattcacactcaaacggcaagctggatgtttggattatcagctgaagcgatcgatcctttgatgcgtcgtgcagcgaagaccatcaatttcggtgttctctacggtatgagtgcctttcgtttgtcgcaggaattaggcattccctatgaagaagctcaggcgttcattcagaaatactttcaaagctatcccaaagttaaagcatggatcgagaagactctccgtgaaggccgcacacgtggttacgtagagaccttatttggacgtcgccgctatgttcccgatttaaacgctcgcgtgaaaggcaagcgtgaagccgccgaacgcatggcgttcaacatgcctgtacagggcacggcagctgacctcatgaaacttgcaatggtgcgcctttttccacaattgcgtgaagttggtgcccgcatgctcttgcaggtccacgatgaactcttgttagaagcgccaaaagagcgtgcggaagaggtggcagccctcgcgaaagaagttatggaaggcgtgtggcccttagcggtgcctcttgaagtcgaagttggtattggcgaggattggctggctgccaaagga

SEQ ID NO: 6270 - protein, 841 aa, synthetic construct
  REGION 1..841: note = Variant of DNA polymerase I from Thermus sp. strain 2.9
MHHHHHHGGSGVLPVFEPKGRVLLVDGHHLAYRNFFALKGLTTSLGEPVQGVYGFAKSLLKALKEDGDVVIVVFDAKAPSFRHEAYEAYKAGRAPTPEDFPRQLALMKELVDLLGLERLEVPGFEADDVLATLAKKAEREGYEVQILTADRDLFQLLSPRISVLHPEGHRITPEWLWEKYGLRPEQWVDFRALAGDPSDNIPGVKGIGEKTALKLLKEWGSLENLLKNLDQVKPESVREKILAHLEDLKLSRELSRVRTDLPLEVDFGRRREPDWEGLKAFLERLEFGSLLHEFGLLESPLLAEEAPWPPPEGAFLGYRLSRPEPMWAELLALAASAQGRVYRAEDPHGALRGLFEVRGLLAKDLAVVALREGLDLPPTDDPMLLAYLLDPSNTTPEGVARRYGGEWTEDALKRALLAERLHENLLGRLQGEERLLWLYEEVEKPLSRVLAHMEATGVKLDVAYLENLSLEVAAHMRRLEEEVFRLAGRSFRLNSRDQLERVLFDELGLPPIGKTEKTGKRSTSAAVLEALREVHPIVDKILQYREMAKLKGTYIDRLPALVHPKTGRLHTRFNQTATATGRLSSSDPNLQNIPVRTPLGQKIRRAFVAEEGWRLVALDYRQIELRVLAHLSGDENLIRVFQEGKDIHTQTASWMFGLSAEAIDPLMRRAAKTINFGVLYGMSAFRLSQELGIPYEEAQAFIQKYFQSYPKVKAWIEKTLREGRTRGYVETLFGRRRYVPDLNARVKGKREAAERMAFNMPVQGTAADLMKLAMVRLFPQLREVGARMLLQVHDELLLEAPKERAEEVAALAKEVMEGVWPLAVPLEVEVGIGEDWLAAKG

SEQ ID NO: 6271 - DNA, 2523 bp, synthetic construct
  misc_feature 1..2523: note = Variant of DNA polymerase I from Thermus sp. strain 2.9
  source 1..2523: mol_type = other DNA
atgcaccatcatcatcatcatggcggtagcggcgtgttaccggtgttcgagcctaaaggtcgcgtgcttctggttgatggccatcatctcgcgtatcgtaacttctttgccctgaaaggattaaccaccagcctgggcgagccggtacagggtgtctacggctttgcaaagtcgctcctgaaagctctgaaagaagacggtgatgtggtgattgttgtctttgatgcgaaagcgccaagttttcgccacgaagcgtacgaagcttacaaagccgggcgtgctccaacgccggaagactttcctcgccaattggcgcttatgaaggaattagtggatttgcttggcctcgaacgcttggaagttcccggtttcgaggcagacgacgtattagcgactctcgcaaagaaagccgaacgtgagggctatgaagtccagatcttgacagcagatcgcgatcttttccagcttttatctccgcgcatctcggtgttacacccggaagggcatcgtatcaccccggaatggctctgggagaaatatggtttgcgtcccgaacaatgggtggattttcgcgccttagcaggcgatccgagcgacaatattccgggagttaaaggtatcggcgagaagacggcgctcaagctccttaaagaatgggggtcgttggagaacttgcttaaggatttagatcaggtcaaaccagagtcagtgcgtgagaagattcttgctcacctcgaagacctcaaattaagccgcgaattgtcccgtgtacgcaccgatttgccgctcgaagttgatttcggtcgccgccgcgaacctgactgggagggtcttaaagcgtttttagagcgtcttgaatttggttcgctcttgcatgaattcggccttttagaaagcccgttactggccgaagaagcaccttggccaccgcccgagggcgcgtttttaggttaccgtttgagtcgcccggaaccgatgtgggccgaattactggctcttgcagcgtctgcccagggacgtgtgtatcgcgcggaagaccctcatggtgcgctccgcggcctcttcgaagtccgtggactccttgccaaagacttagctgttgttgcattgcgcgaaggtcttgatttacctccgactgatgatccaatgcttcttgcgtacctcttggacccgtcaaacacgacgcccgaaggcgtagcccgtcgttacggcggcgagtggaccgaagatgcagcgaaacgcgcgttattggccgaacgtttgcacgaaaatttattaggacgtttgcaaggcgaggaacgtctcctctggctttacgaagaagtggagaaaccattgagtcgcgtgctcgcgcatatggaagctaccggtgtcaaattagacgtggcgtatttggagaatctcagccttgaagttgctgcccacatgcgccgcttggaggaagaagtattccgtttagcaggccgttcctttcgccttaactctcgcgatcagttagaacgtgtgttgttcgatgaacttggtctccctcctatcggcaagacagagaagaccggtaaacgtagcacttcagcggcggttttagaagctcttcgcgaagtccatcccattgtggacaagatcttgcagtaccgcgaaatggcgaaattgaaaggcacctatattgaccgtcttccggcattagtccacccgaaaacgggacgcctccatacccgcttcaaccaaacagccacggcgaccggtcgtttgtcctcctctgatccaaaccttcagaatattccagtacgtaccccattgggccagaagatccgccgtgcgtttgtagctgaggagggttggcgtttagtggccctcgattatcgtcaaattgaattacgtgtccttgcccatctttctggcgatgagaacctcatccgcgtgtttcaggaaggcaaagacattcacactcaaacggcaagctggatgtttggattatcagctgaagcgatcgatcctttgatgcgtcgtgcagcgaagaccatcaatttcggtgttctctacggtatgagtgcctttcgtttgtcgcaggaattaggcattccctatgaagaagctcaggcgttcattcagaaatactttcaagagtatcccaaagttaaagcatggatcgagaagactctccgtgaaggccgcacacgtggttacgtagagaccttatttggacgtcgccgctatgttcccgatttaaacgctcgcgtgaaaggcaagcgtgaagccgccgaacgcatggcgttcaacatgcctgtacagggcacggcagctgacctcatgaaacttgcaatggtgcgcctttttccacaattgcgtgaagttggtgcccgcatgctcttgcaggtccacgatgaactcttgttagaagcgccaaaagagcgtgcggaagaggtggcagccctcgcgaaagaagttatggaaggcgtgtggcccttagcggtgcctcttgaagtcgaagttggtattggcgaggattggctggctgccaaagga

SEQ ID NO: 6272 - protein, 841 aa, synthetic construct
  REGION 1..841: note = Variant of DNA polymerase I from Thermus sp. strain 2.9
MHHHHHHGGSGVLPVFEPKGRVLLVDGHHLAYRNFFALKGLTTSLGEPVQGVYGFAKSLLKALKEDGDVVIVVFDAKAPSFRHEAYEAYKAGRAPTPEDFPRQLALMKELVDLLGLERLEVPGFEADDVLATLAKKAEREGYEVQILTADRDLFQLLSPRISVLHPEGHRITPEWLWEKYGLRPEQWVDFRALAGDPSDNIPGVKGIGEKTALKLLKEWGSLENLLKDLDQVKPESVREKILAHLEDLKLSRELSRVRTDLPLEVDFGRRREPDWEGLKAFLERLEFGSLLHEFGLLESPLLAEEAPWPPPEGAFLGYRLSRPEPMWAELLALAASAQGRVYRAEDPHGALRGLFEVRGLLAKDLAVVALREGLDLPPTDDPMLLAYLLDPSNTTPEGVARRYGGEWTEDAAKRALLAERLHENLLGRLQGEERLLWLYEEVEKPLSRVLAHMEATGVKLDVAYLENLSLEVAAHMRRLEEEVFRLAGRSFRLNSRDQLERVLFDELGLPPIGKTEKTGKRSTSAAVLEALREVHPIVDKILQYREMAKLKGTYIDRLPALVHPKTGRLHTRFNQTATATGRLSSSDPNLQNIPVRTPLGQKIRRAFVAEEGWRLVALDYRQIELRVLAHLSGDENLIRVFQEGKDIHTQTASWMFGLSAEAIDPLMRRAAKTINFGVLYGMSAFRLSQELGIPYEEAQAFIQKYFQEYPKVKAWIEKTLREGRTRGYVETLFGRRRYVPDLNARVKGKREAAERMAFNMPVQGTAADLMKLAMVRLFPQLREVGARMLLQVHDELLLEAPKERAEEVAALAKEVMEGVWPLAVPLEVEVGIGEDWLAAKG

SEQ ID NO: 6273 - DNA, 2523 bp, synthetic construct
  misc_feature 1..2523: note = Variant of DNA polymerase I from Thermus sp. strain 2.9
  source 1..2523: mol_type = other DNA
atgcaccatcatcatcatcatggcggtagcggcgtgttaccggtgttcgagcctaaaggtcgcgtgcttctggttgatggccatcatctcgcgtatcgtaacttctttgccctgaaaggattaaccaccagcctgggcgagccggtacagggtgtctacggctttgcaaagtcgctcctgaaagctctgaaagaagacggtgatgtggtgattgttgtctttgatgcgaaagcgccaagttttcgccacgaagcgtacgaagcttacaaagccgggcgtgctccaacgccggaagactttcctcgccaattggcgcttatgaaggaattagtggatttgcttggcctcgaacgcttggaagttcccggtttcgaggcagacgacgtattagcgactctcgcaaagaaagccgaacgtgagggctatgaagtccagatcttgacagcagatcgcgatcttttccagcttttatctccgcgcatctcggtgttacacccggaagggcatcgtatcaccccggaatggctctgggagaaatatggtttgcgtcccgaacaatgggtggattttcgcgccttagcaggcgatccgagcgacaatattccgggagttaaaggtatcggcgagaagacggcgctcaagctccttaaagaatgggggtcgttggagaacttgcttaagaatttagatcaggtcaaaccagagtcagtgcgtgagaagattcttgctcacctcgaagacctcaaattaagccgcgaattgtcccgtgtacgcaccgatttgccgctcgaagttgatttcggtcgccgccgcgaacctgactgggagggtcttaaagcgtttttagagcgtcttgaatttggttcgctcttgcatgaattcggccttttagaaagcccgttactggccgaagaagcaccttggccaccgcccgagggcgcgtttttaggttaccgtttgagtcgcccggaaccgatgtgggccgaattactggctcttgcagcgtctgcccagggacgtgtgtatcgcgcggaagaccctcatggtgcgctccgcggcctcttcgaagtccgtggactccttgccaaagacttagctgttgttgcattgcgcgaaggtcttgatttacctccgactgatgatccaatgcttcttgcgtacctcttggacccgtcaaacacgacgcccgaaggcgtagcccgtcgttacggcggcgagtggaccgaagatgcagcgaaacgcgcgttattggccgaacgtttgcacgaaaatttattaggacgtttgcaaggcgaggaacgtctcctctggctttacgaagaagtggagaaaccattgagtcgcgtgctcgcgcatatggaagctaccggtgtcaaattagacgtggcgtatttggagaatctcagccttgaagttgctgcccacatgcgccgcttggaggaagaagtattccgtttagcaggccgttcctttcgccttaactctcgcgatcagttagaacgtgtgttgttcgatgaacttggtctccctcctatcggcaagacagagaagaccggtaaacgtagcacttcagcggcggttttagaagctcttcgcgaagtccatcccattgtggacaagatcttgcagtaccgcgaaatggcgaaattgaaaggcacctatattgaccgtcttccggcattagtccacccgaaaacgggacgcctccatacccgcttcaaccaaacagccacggcgaccggtcgtttgtcctcctctgatccaaaccttcagaatattccagtacgtaccccattgggccagaagatccgccgtgcgtttgtagctgaggagggttggcgtttagtggccctcgattatcgtcaaattgaattacgtgtccttgcccatctttctggcgatgagaacctcatccgcgtgtttcaggaaggcaaagacattcacactcaaacggcaagctggatgtttggattatcagctgaagcgatcgatcctttgatgcgtcgtgcagcgaagaccatcaatttcggtgttctctacggtatgagtgcctttcgtttgtcgcaggaattaggcattccctatgaagaagctcaggcgttcattcagaaatactttcaaagctatcccaaagttaaagcatggatcgagaagactctccgtgaaggccgcacacgtggttacgtagagaccttatttggacgtcgccgctatgttcccgatttaaacgctccggtgaaaggcaagcgtgaagccgccgaacgcatggcgttcaacatgcctgtacagggcacggcagctgacctcatgaaacttgcaatggtgcgcctttttccacaattgcgtgaagttggtgcccgcatgctcttgcaggtccacgatgaactcttgttagaagcgccaaaagagcgtgcggaagaggtggcagccctcgcgaaagaagttatggaaggcgtgtggcccttagcggtgcctcttgaagtcgaagttggtattggcgaggattggctggctgccaaagga

SEQ ID NO: 6274 - protein, 841 aa, synthetic construct
  REGION 1..841: note = Variant of DNA polymerase I from Thermus sp. strain 2.9
MHHHHHHGGSGVLPVFEPKGRVLLVDGHHLAYRNFFALKGLTTSLGEPVQGVYGFAKSLLKALKEDGDVVIVVFDAKAPSFRHEAYEAYKAGRAPTPEDFPRQLALMKELVDLLGLERLEVPGFEADDVLATLAKKAEREGYEVQILTADRDLFQLLSPRISVLHPEGHRITPEWLWEKYGLRPEQWVDFRALAGDPSDNIPGVKGIGEKTALKLLKEWGSLENLLKNLDQVKPESVREKILAHLEDLKLSRELSRVRTDLPLEVDFGRRREPDWEGLKAFLERLEFGSLLHEFGLLESPLLAEEAPWPPPEGAFLGYRLSRPEPMWAELLALAASAQGRVYRAEDPHGALRGLFEVRGLLAKDLAVVALREGLDLPPTDDPMLLAYLLDPSNTTPEGVARRYGGEWTEDAAKRALLAERLHENLLGRLQGEERLLWLYEEVEKPLSRVLAHMEATGVKLDVAYLENLSLEVAAHMRRLEEEVFRLAGRSFRLNSRDQLERVLFDELGLPPIGKTEKTGKRSTSAAVLEALREVHPIVDKILQYREMAKLKGTYIDRLPALVHPKTGRLHTRFNQTATATGRLSSSDPNLQNIPVRTPLGQKIRRAFVAEEGWRLVALDYRQIELRVLAHLSGDENLIRVFQEGKDIHTQTASWMFGLSAEAIDPLMRRAAKTINFGVLYGMSAFRLSQELGIPYEEAQAFIQKYFQSYPKVKAWIEKTLREGRTRGYVETLFGRRRYVPDLNAPVKGKREAAERMAFNMPVQGTAADLMKLAMVRLFPQLREVGARMLLQVHDELLLEAPKERAEEVAALAKEVMEGVWPLAVPLEVEVGIGEDWLAAKG

SEQ ID NO: 6275 - DNA, 2523 bp, synthetic construct
  misc_feature 1..2523: note = Variant of DNA polymerase I from Thermus sp. strain 2.9
  source 1..2523: mol_type = other DNA
atgcaccatcatcatcatcatggcggtagcggcgtgttaccggtgttcgagcctaaaggtcgcgtgcttctggttgatggccatcatctcgcgtatcgtaacttctttgccctgaaaggattaaccaccagcctgggcgagccggtacagggtgtctacggctttgcaaagtcgctcctgaaagctctgaaagaagacggtgatgtggtgattgttgtctttgatgcgaaagcgccaagttttcgccacgaagcgtacgaagcttacaaagccgggcgtgctccaacgccggaagactttcctcgccaattggcgcttatgaaggaattagtggatttgcttggcctcgaacgcttggaagttcccggtttcgaggcagacgacgtattagcgactctcgcaaagaaagccgaacgtgagggctatgaagtccagatcttgacagcagatcgcgatcttttccagcttttatctccgcgcatctcggtgttacacccggaagggcatcgtatcaccccggaatggctctgggagaaatatggtttgcgtcccgaacaatgggtggattttcgcgccttagcaggcgatccgagcgacaatattccgggagttaaaggtatcggcgagaagacggcgctcaagctccttaaagaatgggggtcgttggagaacttgcttaagaatttagatcaggtcaaaccagagtcagtgcgtgagaagattcttgctcacctcgaagacctcaaattaagccgcgaattgtcccgtgtacgcaccgatttgccgctcgaagttgatttcggccgccgccgcgaacctgactgggagggtcttaaagcgtttttagagcgtcttgaatttggttcgctcttgcatgaattcggccttttagaaagcccgttaccggccgaagaagcaccttggccaccgcccgagggcgcgtttttaggttaccgtttgagtcgcccggaaccgatgtgggccgaattactggctcttgcagcgtctgcccagggacgtgtgtatcgcgcggaagaccctcatggtgcgctccgcggcctcttcgaagtccgtggactccttgccaaagacttagctgttgttgcattgcgcgaaggtcttgatttacctccgactgatgatccaatgcttcttgcgtacctcttggacccgtcaaacacgacgcccgaaggcgtagcccgtcgttacggcggcgagtggaccgaagatgcagcgaaacgcgcgttattggccgaacgtttgcacgcaaatttattaggacgtttgcaaggcgaggaacgtctcctctggctttacgaagaagtggagaaaccattgagtcgcgtgctcgcgcatatggaagctaccggtgtcaaattagacgtggcgtatttggagaatctcagccttgaagttgctgcccacatgcgccgcttggaggaagaagtattccgtttagcaggccgttcctttcgccttaactctcgcgatcagttagaacgtgtgttgttcgatgaacttggtctccctcctatcggcaagacagagaagaccggtaaacgtagcacttcagcggcggttttagaagctcttcgcgaagtccatcccattgtggacaagatcttgcagtaccgcgaactggcgaaattgaaaggcacctatattgaccgtcttccggcattagtccacccgaaaacgggacgcctccatacccgcttcaaccaaacagccacggcgaccggtcgtttgtcctcctctgatccaaaccttcagaatattccagtacgtaccccattgggccagaagatccgccgtgcgtttgtagctgaggagggttggcgtttagtggccctcgattatcgtcaaattgaattacgtgtccttgcccatctttctggcgatgagaacctcatccgcgtgtttcaggaaggcaaagacattcacactcaaacggcaagctggatgtttggattatcagctgaagcgatcgatcctttgatgcgtcgtgcagcgaagaccatcaatttcggtgttctctacggtatgagtgcctttcgtttgtcgcaggaattaggcattccctatgaagaagctcaggcgttcattcagaaatactttcaaagctatcccaaagttaaagcatggatcgagaagactctcgaggaaggccgcacacgtggttacgtagagaccttatttggacgtcgccgctatgttcccgatttaaacgctcgcgtgaaaggcaaacgtgaagccgccgaacgcatggcgttcaacatgcctgtacagggcacggcagctgacctcatgaaacttgcaatggtgcgcctttttccacaattgcgtgaagttggtgcccgcatgctcttgcaggtccacgatgaactcttgttagaagcgccaaaagagcgtgcggaagaggtggcagccctcgcgaaagaagttatggaaggcgtgtggcccttagcggtgcctcttgaagtcgaagttggtattggcgaggattggctggctgccaaagga

SEQ ID NO: 6276 - protein, 841 aa, synthetic construct
  REGION 1..841: note = Variant of DNA polymerase I from Thermus sp. strain 2.9
MHHHHHHGGSGVLPVFEPKGRVLLVDGHHLAYRNFFALKGLTTSLGEPVQGVYGFAKSLLKALKEDGDVVIVVFDAKAPSFRHEAYEAYKAGRAPTPEDFPRQLALMKELVDLLGLERLEVPGFEADDVLATLAKKAEREGYEVQILTADRDLFQLLSPRISVLHPEGHRITPEWLWEKYGLRPEQWVDFRALAGDPSDNIPGVKGIGEKTALKLLKEWGSLENLLKNLDQVKPESVREKILAHLEDLKLSRELSRVRTDLPLEVDFGRRREPDWEGLKAFLERLEFGSLLHEFGLLESPLPAEEAPWPPPEGAFLGYRLSRPEPMWAELLALAASAQGRVYRAEDPHGALRGLFEVRGLLAKDLAVVALREGLDLPPTDDPMLLAYLLDPSNTTPEGVARRYGGEWTEDAAKRALLAERLHANLLGRLQGEERLLWLYEEVEKPLSRVLAHMEATGVKLDVAYLENLSLEVAAHMRRLEEEVFRLAGRSFRLNSRDQLERVLFDELGLPPIGKTEKTGKRSTSAAVLEALREVHPIVDKILQYRELAKLKGTYIDRLPALVHPKTGRLHTRFNQTATATGRLSSSDPNLQNIPVRTPLGQKIRRAFVAEEGWRLVALDYRQIELRVLAHLSGDENLIRVFQEGKDIHTQTASWMFGLSAEAIDPLMRRAAKTINFGVLYGMSAFRLSQELGIPYEEAQAFIQKYFQSYPKVKAWIEKTLEEGRTRGYVETLFGRRRYVPDLNARVKGKREAAERMAFNMPVQGTAADLMKLAMVRLFPQLREVGARMLLQVHDELLLEAPKERAEEVAALAKEVMEGVWPLAVPLEVEVGIGEDWLAAKG

SEQ ID NO: 6277 - DNA, 2523 bp, synthetic construct
  misc_feature 1..2523: note = Variant of DNA polymerase I from Thermus sp. strain 2.9
  source 1..2523: mol_type = other DNA
atgcaccatcatcatcatcatggcggtagcggcgtgttaccggtgttcgaacctaaaggtcgcgtgcttctggttgatggccatcatctcgcgtatcgtaacttctttgccctgaaaggattaaccaccagcctgggcgagccggtacagggtgtctacggctttgcaaagtcgctcctgaaagctctgaaagaagacggtgatgtggtgattgttgtctttgatgcgaaagcgccaagttttcgccacgaagcgtacgaagcttacaaagccgggcgtgctccaacgccggaagactttcctcgccaattggcgcttatgaaggaattagtggatttgcttggcctcgaacgcttggaagttcccggtttcgaggcagacgacgtattagcgactctcgcaaagaaagccgaacgtgagggctatgaagtccagatcttgacagcagatcgcgatcttttccagcttttatctccgcgcatctcggtgttacacccggaagggcatcgtatcaccccggaatggctctgggagaaatatggtttgcgtcccgaacaatgggtggattttcgcgccttagcaggcgatccgagcgacaatattccgggagttaaaggtatcggcgagaagacggcgctcaagctccttaaagaatgggggtcgttggagaacttgcttaagaatttagatcaggtcaaaccagagtcagtgcgtgagaagattcttgctcacctcgaagacctcaaattaagccgcgaattgtcccgtgtacgcaccgatttgccgctcgaagttgatttcggccgccgccgcgaacctgactgggagggtcttaaagcgtttttagagcgtcttgaatttggttcgctcttgcatgaattcggccttttagaaagcccgttactggccgaagaagcaccttggccaccgcccgagggcgcgtttttaggttaccgtttgagtcgcccggaaccgatgtgggccgaattactggctcttgcagcgtctgcccagggacgtgtgtatcgcgcggaagaccctcatggtgcgctccgcggcctcttcgaagtccgtggactccttgccaaagacttagctgttgttgcattgcgcgaaggtcttgatttacctccgactgatgatccaatgcttcttgcgtacctcttggacccgtcaaacacgacgcccgaaggcgtagcccgtcgttacggcggcgagtggaccgaagatgcagcgaaacgcgcgttattggccgaacgtttgcacgcaaatttattaggacgtttgcaaggcgaggaacgtctcctctggctttacgaagaagtggagaaaccattgagtcgcgtgctcgcgcatatggaagctaccggtgtcaaattagacgtggcgtatttggagaatcttcaccttgaagttgctgcccacatgcgccgcttggaggaagaagtattccgtttagcaggccgttcctttcgccttaactctcgcgatcagttagaacgtgtgttgttcgatgaacttggtctccctcctatcggcaagacagagaagaccggtaaacgtagcacttcagcggcggttttagaagctcttcgcgaagtccatcccattgtggacaagatcttgcagtaccgcgaaatggcgaaattgaaaggcacctatattgaccgtcttccggcattagtccacccgaaaacgggacgcctccatacccgcttcaaccaaacagccacggcgaccggtcgtttgtcctcctctgatccaaaccttcagaatattccagtacgtaccccattgggccagaagatccgccgtgcgtttgtagctgaggagggttggcgtttagtggccctcgattatagtcaaattgaattacgtgtccttgcccatctttctggcgatgagaacctcatccgcgtgtttcaggaaggcaaagacattcacactcaaacggcaagctggatgtttggattatcagctgaagcgatcgatcctttgatgcgtcgtgcagcgaagaccatcaatttcggtgttctctacggtatgagtgcctttcgtttgtcgcaggaattaggcattccctatgaagaagctcaggcgttcattcagaaatactttcaaagctatcccaaagttaaagcatggatcgagaagactctccgtgaaggccgcacacgtggttacgtagagaccttatttggacgtcgccgctatgttcccgatttaaacgctcgcgtgaaaggcaagcgtgaagccgccgaacgcatggcgttcaacatgcctgtacagggcacggcagctgacctcatgaaacttgcaatggtgcgcctttttccacaattgcgtgaagttggtgcccgcatgctcttgcaggtccacgatgaactcttgttagaagcgccaaaagagcgtgcggaagaggtggcagccctcgcgaaagaagttatggaaggcgtgtggcccttagcggtgcctcttgaagtcgaagttggtattggcgaggattggctggctgccaaagga

SEQ ID NO: 6278 - protein, 841 aa, synthetic construct
  REGION 1..841: note = Variant of DNA polymerase I from Thermus sp. strain 2.9
MHHHHHHGGSGVLPVFEPKGRVLLVDGHHLAYRNFFALKGLTTSLGEPVQGVYGFAKSLLKALKEDGDVVIVVFDAKAPSFRHEAYEAYKAGRAPTPEDFPRQLALMKELVDLLGLERLEVPGFEADDVLATLAKKAEREGYEVQILTADRDLFQLLSPRISVLHPEGHRITPEWLWEKYGLRPEQWVDFRALAGDPSDNIPGVKGIGEKTALKLLKEWGSLENLLKNLDQVKPESVREKILAHLEDLKLSRELSRVRTDLPLEVDFGRRREPDWEGLKAFLERLEFGSLLHEFGLLESPLLAEEAPWPPPEGAFLGYRLSRPEPMWAELLALAASAQGRVYRAEDPHGALRGLFEVRGLLAKDLAVVALREGLDLPPTDDPMLLAYLLDPSNTTPEGVARRYGGEWTEDAAKRALLAERLHANLLGRLQGEERLLWLYEEVEKPLSRVLAHMEATGVKLDVAYLENLHLEVAAHMRRLEEEVFRLAGRSFRLNSRDQLERVLFDELGLPPIGKTEKTGKRSTSAAVLEALREVHPIVDKILQYREMAKLKGTYIDRLPALVHPKTGRLHTRFNQTATATGRLSSSDPNLQNIPVRTPLGQKIRRAFVAEEGWRLVALDYSQIELRVLAHLSGDENLIRVFQEGKDIHTQTASWMFGLSAEAIDPLMRRAAKTINFGVLYGMSAFRLSQELGIPYEEAQAFIQKYFQSYPKVKAWIEKTLREGRTRGYVETLFGRRRYVPDLNARVKGKREAAERMAFNMPVQGTAADLMKLAMVRLFPQLREVGARMLLQVHDELLLEAPKERAEEVAALAKEVMEGVWPLAVPLEVEVGIGEDWLAAKG

SEQ ID NO: 6279 - DNA, 2523 bp, synthetic construct
  misc_feature 1..2523: note = Variant of DNA polymerase I from Thermus sp. strain 2.9
  source 1..2523: mol_type = other DNA
atgcaccatcatcatcatcatggcggtagcggcgtgttaccggtgttcgagcctaaaggtcgcgtgcttctggttgatggccatcatctcgcgtatcgtaacttctttgccctgaaaggattaaccaccagcctgggcgagccggtacagggtgtctacggctttgcaaagtcgctcctgaaagctctgaaagaagacggtgatgtggtgattgttgtctttgatgcgaaagcgccaagttttcgccacgaagcgtacgaagcttacaaagccgggcgtgctccaacgccggaagactttcctcgccaattggcgcttatgaaggaattagtggatttgcttggcctcgaacgcttggaagttcccggtttcgaggcagacgacgtattagcgactctcgcaaagaaagccgaacgtgagggctatgaagtccagatcttgacagcagatcgcgatcttttccagcttttatctccgcgcatctcggtgttacacccggaagggcatcgtatcaccccggaatggctctgggagaaatatggtttgcgtcccgaacaatgggtggattttcgcgccttagcaggcgatccgagcgacaatattccgggagttaaaggtatcggcgagaagacggcgctcaagctccttaaagaatgggggtcgttggagaacttgcttaagaatttagatcaggtcaaaccagagtcagtgcgtgagaagattcttgctcacctcgaagacctcaaattaagccgcgaattgtcccgtgtacgcaccgatttgccgctcgaagttgatttcggccgccgccgcgaacctgactgggagggtcttaaagcgtttttagagcgtcttgaatttggttcgctcttgcatgaattcggccttttagaaagcccgttactggccgaagaagcaccttggccaccgcccgagggcgcgtttttaggttaccgtttgagtcgcccggaaccgatgtgggccgaattactggctcttgcagcgtctgcccagggacgtgtgtatcgcgcggaagaccctcatggtgcgctccgcggcctcttcgaagtccgtggactccttgccaaagacttagctgttgttgcattgcgcgaaggtcttgatttacctccgactgatgatccaatgcttcttgcgtacctcttggacccgtcaaacacgacgcccgaaggcgtagcccgtcgttacggcggcgagtggaccgaagatgcagcgaaacgcgcgttattggccgaacgtttgcacgaaaatttattaggacgtttgcaaggcgaggaacgtctcctctggctttacgaagaagtggagaaaccattgagtcgcgtgctcgcgcatatggaagctaccggtgtcaaattagacgtggcgtatttggagaatcttcaccttgaagttgctgcccacatgcgccgcttggaggaagaagtattccgtttagcaggccgttcctttcgccttaactctcgcgatcagttagaacgtgtgttgttcgatgaacttggtctccctcctatcggcaagacagagaagaccggtaaacgtagcacttcagcggcggttttagaagctcttcgcgaagtccatcccattgtggacaagatcttgcagtaccgcgaaatggcgaaattgaaaggcacctatattgaccgtcttccggcattagtccacccgaaaacgggacgcctccatacccgcttcaaccaaacagccacggcgaccggtcgtttgtcctcctctgatccaaaccttcagaatattccagtacgtaccccattgggccagaagatccgccgtgcgtttgtagctgaggagggttggcgtttagtggccctcgattatcgtcaaattgaattacgtgtccttgcccatctttctggcgatgagaacctcatccgcgtgtttcaggaaggcaaagacattcacactcaaacggcaagctggatgtttggattatcagctgaagcgatcgatcctttgatgcgtcgtgcagcgaagaccatcaatttcggtgttctctacggtatgagtgcctttcgtttgtcgcaggaattaggcattccctatgaagaagctcaggcgttcattcagaaatactttcaaagctatcccaaagttaaagcatggatcgagaagactctccgtgaaggccgcacacgtggttacgtagagaccttatttggacgtcgccgctatgttcccgatttaaacgctcgcgtgaaaggcaaacgtgaagccgccgaacgcatggcgttcaacatgcctgtacagggcacggcagctgacctcatgaaacttgcaatggtgcgcctttttccacaattgcgtgaagttggtgcccgcatgctcttgcaggtccacgatgaactcttgttagaagcgccaaaagagcgtgcggaagaggtggcagccctcgcgaaagaagttatggaaggcgtgtggcccttagcggtgcctcttgaagtcgaagttggtattggcgaggattggctggctgccaaagga

SEQ ID NO: 6280 - protein, 841 aa, synthetic construct
  REGION 1..841: note = Variant of DNA polymerase I from Thermus sp. strain 2.9
MHHHHHHGGSGVLPVFEPKGRVLLVDGHHLAYRNFFALKGLTTSLGEPVQGVYGFAKSLLKALKEDGDVVIVVFDAKAPSFRHEAYEAYKAGRAPTPEDFPRQLALMKELVDLLGLERLEVPGFEADDVLATLAKKAEREGYEVQILTADRDLFQLLSPRISVLHPEGHRITPEWLWEKYGLRPEQWVDFRALAGDPSDNIPGVKGIGEKTALKLLKEWGSLENLLKNLDQVKPESVREKILAHLEDLKLSRELSRVRTDLPLEVDFGRRREPDWEGLKAFLERLEFGSLLHEFGLLESPLLAEEAPWPPPEGAFLGYRLSRPEPMWAELLALAASAQGRVYRAEDPHGALRGLFEVRGLLAKDLAVVALREGLDLPPTDDPMLLAYLLDPSNTTPEGVARRYGGEWTEDAAKRALLAERLHENLLGRLQGEERLLWLYEEVEKPLSRVLAHMEATGVKLDVAYLENLHLEVAAHMRRLEEEVFRLAGRSFRLNSRDQLERVLFDELGLPPIGKTEKTGKRSTSAAVLEALREVHPIVDKILQYREMAKLKGTYIDRLPALVHPKTGRLHTRFNQTATATGRLSSSDPNLQNIPVRTPLGQKIRRAFVAEEGWRLVALDYRQIELRVLAHLSGDENLIRVFQEGKDIHTQTASWMFGLSAEAIDPLMRRAAKTINFGVLYGMSAFRLSQELGIPYEEAQAFIQKYFQSYPKVKAWIEKTLREGRTRGYVETLFGRRRYVPDLNARVKGKREAAERMAFNMPVQGTAADLMKLAMVRLFPQLREVGARMLLQVHDELLLEAPKERAEEVAALAKEVMEGVWPLAVPLEVEVGIGEDWLAAKG

SEQ ID NO: 6281 - DNA, 2523 bp, synthetic construct
  misc_feature 1..2523: note = Variant of DNA polymerase I from Thermus sp. strain 2.9
  source 1..2523: mol_type = other DNA
atgcaccatcatcatcatcatggcggtagcggcgtgttaccggtgttcgagcctaaaggtagcgtgcttctggttgatggccatcatctcgcgtatcgtaacttctttgccctgaaaggattaaccaccagcctgggcgagccggtacagggtgtctacggctttgcaaagtcgctcctgaaagctctgaaagaagacggtgatgtggtgattgttgtctttgatgcgaaagcgccaagttttcgccacgaagcgtacgaagcttacaaagccgggcgtgctccaacgccggaagactttcctcgccaattggcgcttatgaaggaattagtggatttgcttggcctcgaacgcttggaagttcccggtttcgaggcagacgacgtattagcgactctcgcaaagaaagccgaacgtgagggctatgaagtccagatcttgacagcagatcgcgatcttttccagcttttatctccgcgcatctcggtgttacacccggaagggcatcgtatcaccccggaatggctctgggagaaatatggtttgcgtcccgaacaatgggtggattttcgcgccttagcaggcgatccgagcgacaatattccgggagttaaaggtatcggcgagaagacggcgctcaagctccttaaagaatgggggtcgttggagaacttgcttaagaatttagatcaggtcaaaccagagtcagtgcgtgagaagattcttgctcacctcgaagacctcaaattaagccgcgaattgtcccgtgtacgcaccgatttgccgctcgaagttgatttcggtcgccgccgcgaacctgactgggagggtcttaaagcgtttttagagcgtcttgaatttggttcgctcttgcatgaattcggccttttagaaagcccgttactggccgaagaagcaccttggccaccgcccgagggcgcgtttttaggttaccgtttgagtcgcccggaaccgatgtgggccgaattactggctcttgcagcgtctgcccagggacgtgtgtatcgcgcggaagaccctcatggtgcgctccgcggcctcttcgaagtccgtggcctccttgccaaagacttagctgttgttgcattgcgcgaaggtcttgatttacctccgactgatgatccaatgcttcttgcgtacctcttggacccgtcaaacacgacgcccgaaggcgtagcccgtcgttacggcggcgagtggaccgaagatgcagcgaaacgcgcgttattggccgaacgtttgcacgaaaatttattaggacgtttgcaaggcgaggaacgtctcctctggctttacgaagaagtggagaaaccattgagtcgcgtgctcgcgcatatggaagctaccggtgtcaaattagacgtggcgtatttggagaatctcagccttgaagttgctgcccacatgcgccgcttggaggaagaagtattccgtttagcaggccgttcctttcgccttaactctcgcgatcagttagaacgtgtgttgttcgatgaacttggtctccctcctatcggcaagacagagaagaccggtaaacgtagcacttcagcggcggttttagaagctcttcgcgaagtccatcccattgtggacaagatcttgcagtaccgcgaaatggcgaaattgaaaggcacctatattgaccgtcttccggcattagtccacccgaaaacgggacgcctccatacccgcttcaaccaaacagccacggcgaccggtcgtttgtcctcctctgatccaaaccttcagaatattccagtacgtaccccattgggccagaagatccgccgtgcgtttgtagctgaggagggttggcgtttagtggccctcgattatcgtcaaattgaattacgtgtccttgcccatctttctggcgatgagaacctcatccgcgtgtttcaggaaggcaaagacattcacactcaaacggcaagctggatgtttggattatcagctgaagcgatcgatcctttgatgcgtcgtgcagcgaagaccatcaatttcggtgttctctacggtatgagtgcctttcgtttgtcgcaggaattaggcattcccctggaagaagctcagggtttcattcagaaatactttcaaagctatcccaaagttaaagcatggatcgagaagactctccgtgaaggccgcacacgtggttacgtagagaccttatttggacgtcgccgctatgttcccgatttaaacgctcgcgtgaaaggcaagcgtgaagccgccgaacgcatggcgttcaacatgcctgtacagggcacggcagctgacctcatgaaacttgcaatggtgcgcctttttccacaattgcgtgaagttggtgcccgcatgctcttgcaggtccacgatgaactcttgttagaagcgccaaaagagcgtgcggaagaggtggcagccctcgcgaaagaagttatggaaggcgtgtggcccttagcggtgcctcttgaagtcgaagttggtattggcgaggattggctggctgccaaagga

SEQ ID NO: 6282 - protein, 841 aa, synthetic construct
  REGION 1..841: note = Variant of DNA polymerase I from Thermus sp. strain 2.9
MHHHHHHGGSGVLPVFEPKGSVLLVDGHHLAYRNFFALKGLTTSLGEPVQGVYGFAKSLLKALKEDGDVVIVVFDAKAPSFRHEAYEAYKAGRAPTPEDFPRQLALMKELVDLLGLERLEVPGFEADDVLATLAKKAEREGYEVQILTADRDLFQLLSPRISVLHPEGHRITPEWLWEKYGLRPEQWVDFRALAGDPSDNIPGVKGIGEKTALKLLKEWGSLENLLKNLDQVKPESVREKILAHLEDLKLSRELSRVRTDLPLEVDFGRRREPDWEGLKAFLERLEFGSLLHEFGLLESPLLAEEAPWPPPEGAFLGYRLSRPEPMWAELLALAASAQGRVYRAEDPHGALRGLFEVRGLLAKDLAVVALREGLDLPPTDDPMLLAYLLDPSNTTPEGVARRYGGEWTEDAAKRALLAERLHENLLGRLQGEERLLWLYEEVEKPLSRVLAHMEATGVKLDVAYLENLSLEVAAHMRRLEEEVFRLAGRSFRLNSRDQLERVLFDELGLPPIGKTEKTGKRSTSAAVLEALREVHPIVDKILQYREMAKLKGTYIDRLPALVHPKTGRLHTRFNQTATATGRLSSSDPNLQNIPVRTPLGQKIRRAFVAEEGWRLVALDYRQIELRVLAHLSGDENLIRVFQEGKDIHTQTASWMFGLSAEAIDPLMRRAAKTINFGVLYGMSAFRLSQELGIPLEEAQGFIQKYFQSYPKVKAWIEKTLREGRTRGYVETLFGRRRYVPDLNARVKGKREAAERMAFNMPVQGTAADLMKLAMVRLFPQLREVGARMLLQVHDELLLEAPKERAEEVAALAKEVMEGVWPLAVPLEVEVGIGEDWLAAKG

SEQ ID NO: 6283 - DNA, 2523 bp, synthetic construct
  misc_feature 1..2523: note = Variant of DNA polymerase I from Thermus sp. strain 2.9
  source 1..2523: mol_type = other DNA
atgcaccatcatcatcatcatggcggtagcggcgtgttaccggtgttcgagcctaaaggtcgcgtgcttctggttgatggccatcatctcgcgtatcgtaacttctttgccctgaaaggattaaccaccagcctgggcgagccggtacagggtgtctacggctttgcaaagtcgctcctgaaagctctgaaagaagacggtgatgtggtgattgttgtctttgatgcgaaagcgccaagttttcgccacgaagcgtacgaagcttacaaagccgggcgtgctccaacgccggaagactttcctcgccaattggcgcttatgaaggaattagtggatttgcttggcctcgaacgcttggaagttcccggtttcgaggcagacgacgtattagcgactctcgcaaagaaagccgaacgtgagggctatgaagtccagatcttgacagcagatcgcgatcttttccagcttttatctccgcgcatctcggtgttacacccggaagggcatcgtatcaccccggaatggctctgggagaaatatggtttgcgtcccgaacaatgggtggattttcgcgccttagcaggcgatccgagcgacaatattccgggagttaaaggtatcggcgagaagacggcgctcaagctccttaaagaatgggggtcgttggagaacttgcttaagaatttagatcaggtcaaaccagagtcagtgcgtgagaagattcttgctcacctcgaagacctcaaattaagccgcgaattgtcccgtgtacgcaccgatttgccgctcgaagttgatttcggtcgccgccgcgaacctgactgggagggtcttaaagcgtttttagagcgtcttgaatttggttcgctcttgcatgaattcggccttttagaaagcccgttactggccgaagaagcaccttggccaccgcccgagggcgcgtttttaggttaccgtttgagtcgcccggaaccgatgtgggccgaattactggctcttgcagcgtctgcccagggacgtgtgtatcgcgcggaagaccctcatggtgcgctccgcggcctcttcgaagtccgtggactccttgccaaagacttagctgttgttgcattgcgcgaaggtcttgatttacctccgactgatgatccaatgcttcttgcgtacctcttggacccgtcaaacacgacgcccgaaggcgtagcccgtcgttacggcggcgagtggaccgaagatgcagcgaaacgcgcgttacaggccgaacgtttgcacgaaaatttattaggacgtttgcaaggcgaggaacgtctcctctggctttacgaagaagtggagaaaccattgagtcgcgtgctcgcgcatatggaagctaccggtgtcaaattagacgtggcgtatttggagaatctcagccttgaagttgctgcccacatgcgccgcttggaggaagaagtattccgtttagcaggccgttcctttcgccttaactctcgcgatcagttagaacgtgtgttgttcgatgaacttggtctccctcctatcggcaagacagagaagaccggtaaacgtagcacttcagcggcggttttagaagctcttcgcgaagtccatcccattgtggacaagatcttgcagtaccgcgaaatggcgaaattgaaaggcacctatattgaccgtcttccggcattagtccacccgaaaacgggacgcctccatacccgcttcaaccaaacagccacggcgaccggtcgtttgtcctcctctgatccaaaccttcagaatattccagtacgtaccccattgggccagaagatccgccgtgcgtttgtagctgaggagggttggcgtttagtggccctcgattatcgtcaaattgaattacgtgtccttgcccatctttctggcgatgagaacctcatccgcgtgtttcaggaaggcaaagacattcacactcaaacggcaagctggatgtttggattatcagctgaagcgatcgatcctttgatgcgtcgtgcagcgaagaccatcaatttcggtgttctctacggtatgagtgcctttcgtttgtcgcaggaattaggcattccctatgaagaagctcaggcgttcattcagaaatactttcaaagctatcccaaagttaaagcatggatcgagaagactctccgtgaaggccgcacacgtggttacgtagagaccttatttggacgtcgccgctatgttcccgatttaaacgctcgcgtgaaaggcaagcgtgaagccgccgaacgcatggcgttcaacatgcctgtacagggcacggcagctgacctcatgaaacttgcaatggtgcgcctttttccacaattgcgtgaagttggtgcccgcatgctcttgcaggtccacgatgaactcttgttagaagcgccaaaagagcgtgcggaagaggtggcagccctcgcgaaagaagttatggaaggcgtgtggcccttagcggtgcctcttgaagtcgaagttggtattggcgaggattggctggctgccaaagga

SEQ ID NO: 6284 - protein, 841 aa, synthetic construct
  REGION 1..841: note = Variant of DNA polymerase I from Thermus sp. strain 2.9
MHHHHHHGGSGVLPVFEPKGRVLLVDGHHLAYRNFFALKGLTTSLGEPVQGVYGFAKSLLKALKEDGDVVIVVFDAKAPSFRHEAYEAYKAGRAPTPEDFPRQLALMKELVDLLGLERLEVPGFEADDVLATLAKKAEREGYEVQILTADRDLFQLLSPRISVLHPEGHRITPEWLWEKYGLRPEQWVDFRALAGDPSDNIPGVKGIGEKTALKLLKEWGSLENLLKNLDQVKPESVREKILAHLEDLKLSRELSRVRTDLPLEVDFGRRREPDWEGLKAFLERLEFGSLLHEFGLLESPLLAEEAPWPPPEGAFLGYRLSRPEPMWAELLALAASAQGRVYRAEDPHGALRGLFEVRGLLAKDLAVVALREGLDLPPTDDPMLLAYLLDPSNTTPEGVARRYGGEWTEDAAKRALQAERLHENLLGRLQGEERLLWLYEEVEKPLSRVLAHMEATGVKLDVAYLENLSLEVAAHMRRLEEEVFRLAGRSFRLNSRDQLERVLFDELGLPPIGKTEKTGKRSTSAAVLEALREVHPIVDKILQYREMAKLKGTYIDRLPALVHPKTGRLHTRFNQTATATGRLSSSDPNLQNIPVRTPLGQKIRRAFVAEEGWRLVALDYRQIELRVLAHLSGDENLIRVFQEGKDIHTQTASWMFGLSAEAIDPLMRRAAKTINFGVLYGMSAFRLSQELGIPYEEAQAFIQKYFQSYPKVKAWIEKTLREGRTRGYVETLFGRRRYVPDLNARVKGKREAAERMAFNMPVQGTAADLMKLAMVRLFPQLREVGARMLLQVHDELLLEAPKERAEEVAALAKEVMEGVWPLAVPLEVEVGIGEDWLAAKG

SEQ ID NO: 6285 - DNA, 2523 bp, synthetic construct
  misc_feature 1..2523: note = Variant of DNA polymerase I from Thermus sp. strain 2.9
  source 1..2523: mol_type = other DNA
atgcaccatcatcatcatcatggcggtagcggcgtgttaccggtgttcgagcctaaaggtcgcgtgcttctggttgatggccatcatctcgcgtatcgtaacttctttgccctgaaaggattaaccaccagcctgggcgagccggtacagggtgtctacggctttgcaaagtcgctcctgaaagctctgaaagaagacggtgatgtggtgattgttgtctttgatgcgaaagcgccaagttttcgccacgaagcgtacgaagcttacaaagccgggcgtgctccaacgccggaagactttcctcgccaattggcgcttatgaaggaattagtggatttgcttggcctcgaacgcttggaagttcccggtttcgaggcagacgacgtattagcgactctcgcaaagaaagccgaacgtgagggctatgaagtccagatcttgacagcagatcgcgatcttttccagcttttatctccgcgcatctcggtgttacacccggaagggcatcgtatcaccccggaatggctctgggagaaatatggtttgcgtcccgaacaatgggtggattttcgcgccttagcaggcgatccgagcgacaatattccgggagttaaaggtatcggcgagaagacggcgctcaagctccttaaagaatgggggtcgttggagaacttgcttaagaatttagatcaggtcaaaccagagtcagtgcgtgagaagattcttgctcacctcgaagacctcaaattaagccgcgaattgtcccgtgtacgcaccgatttgccgctcgaagttgatttcggtcgccgccgcgaacctgactgggagggtcttaaagcgtttttagagcgtcttgaatttggttcgctcttgcatgaattcggccttttagaaagcccgttactggccgaagaagcaccttggccaccgcccgagggcgcgtttttaggttaccgtttgagtcgcccggaaccgatgtgggccgaattactggctcttgcagcgtctgcccagggacgtgtgtatcgcgcggaagaccctcatggtgcgctccgcggcctcttcgaagtccgtggactccttgccaaagacttagctgttgttgcattgcgcgaaggtcttgatttacctccgactgatgatccaatgcttcttgcgtacctcttggacccgtcaaacacgacgcccgaaggcgtagcccgtcgttacggcggcgagtggaccgaagatgcagcgaaacgcgcgttattggccgaacgtttgcacgaaaatttattaggacgtttgcaaggcgaggaacgtctcctctggctttacgaagaagtggagaaaccattgagtcgcgtgctcgcgcatatggaagctaccggtgtcaaattagacgtggcgtatttggagaatctcagccttgaagttgctgcccacatgcgccgcttggaggaagaagtattccgtttagcaggccgttcctttcgccttaactctcgcgatcagttagaacgtgtgttgttcgatgaacttggtctccctcctatcggcaagacagagaagaccggtaaacgtagcacttcagcggcggttttagaagctcttcgcgaagtccatcccattgtggacaagatcttgcagtaccgcgaaatggcgaaattgaaaggcacctatattgaccgtcttccggcattagtccacccgaaaacgggacgcctccatacccgcttcaaccaaacagccacggcgaccggtcgtttgtcctcctctgatccaaaccttcagaatattccagtacgtaccccattgggccagaagatccgccgtgcgtttgtagctgaggagggttggcgtttagtggccctcgattatcgtcaaattgaattacgtgtccttgcctggctttctggcgatgagaacctcatccgcgtgtttcaggaaggcaaagacattcacactcaaacggcaagctggatgtttggattatcagctgaagcgatcgatcctttgatgcgtcgtgcagcgaagaccatcaatttcggtgttctctacggtatgagtgcctttcgtttgtcgcaggaattaggcattccctatgaagaagctcaggcgttcattcagaaatactttcaaagctatcccaaagttaaagcatggatcgagaagactctccgtgaaggccgcacacgtggttacgtagagaccttatttggacgtcgccgctatgttcccgatttaaacgctcgcgtgaaaggcaagcgtgaagccgccgaacgcatggcgttcaacatgcctgtacagggcacggcagctgacctcatgaaacttgcaatggtgcgcctttttccacaattgcgtgaagttggtgcccgcatgctcttgcaggtccacgatgaactcttgttagaagcgccaaaagagcgtgcggaagaggtggcagccctcgcgaaagaagttatggaaggcgtgtggcccttagcggtgcctcttgaagtcgaagttggtattggcgaggattggctggctgccaaagga

SEQ ID NO: 6286 - protein, 841 aa, synthetic construct
  REGION 1..841: note = Variant of DNA polymerase I from Thermus sp. strain 2.9
MHHHHHHGGSGVLPVFEPKGRVLLVDGHHLAYRNFFALKGLTTSLGEPVQGVYGFAKSLLKALKEDGDVVIVVFDAKAPSFRHEAYEAYKAGRAPTPEDFPRQLALMKELVDLLGLERLEVPGFEADDVLATLAKKAEREGYEVQILTADRDLFQLLSPRISVLHPEGHRITPEWLWEKYGLRPEQWVDFRALAGDPSDNIPGVKGIGEKTALKLLKEWGSLENLLKNLDQVKPESVREKILAHLEDLKLSRELSRVRTDLPLEVDFGRRREPDWEGLKAFLERLEFGSLLHEFGLLESPLLAEEAPWPPPEGAFLGYRLSRPEPMWAELLALAASAQGRVYRAEDPHGALRGLFEVRGLLAKDLAVVALREGLDLPPTDDPMLLAYLLDPSNTTPEGVARRYGGEWTEDAAKRALLAERLHENLLGRLQGEERLLWLYEEVEKPLSRVLAHMEATGVKLDVAYLENLSLEVAAHMRRLEEEVFRLAGRSFRLNSRDQLERVLFDELGLPPIGKTEKTGKRSTSAAVLEALREVHPIVDKILQYREMAKLKGTYIDRLPALVHPKTGRLHTRFNQTATATGRLSSSDPNLQNIPVRTPLGQKIRRAFVAEEGWRLVALDYRQIELRVLAWLSGDENLIRVFQEGKDIHTQTASWMFGLSAEAIDPLMRRAAKTINFGVLYGMSAFRLSQELGIPYEEAQAFIQKYFQSYPKVKAWIEKTLREGRTRGYVETLFGRRRYVPDLNARVKGKREAAERMAFNMPVQGTAADLMKLAMVRLFPQLREVGARMLLQVHDELLLEAPKERAEEVAALAKEVMEGVWPLAVPLEVEVGIGEDWLAAKG

SEQ ID NO: 6287 - DNA, 2523 bp, synthetic construct
  misc_feature 1..2523: note = Variant of DNA polymerase I from Thermus sp. strain 2.9
  source 1..2523: mol_type = other DNA
atgcaccatcatcatcatcatggcggtagcggcgtgttaccggtgttcgagcctaaaggtcgcgtgcttctggttgatggccatcatctcgcgtatcgtaacttctttgccctgaaaggattaaccaccagcctgggcgagccggtacagggtgtctacggctttgcaaagtcgctcctgaaagctctgaaagaagacggtgatgtggtgattgttgtctttgatgcgaaagcgccaagttttcgccacgaagcgtacgaagcttacaaagccgggcgtgctccaacgccggaagactttcctcgccaattggcgcttatgaaggaattagtggatttgcttggcctcgaacgcttggaagttcccggtttcgaggcagacgacgtattagcgactctcgcaaagaaagccgaacgtgagggctatgaagtccagatcttgacagcagatcgcgatcttttccagcttttatctccgcgcatctcggtgttacacccggaagggcatcgtatcaccccggaatggctctgggagaaatatggtttgcgtcccgaacaatgggtggattttcgcgccttagcaggcgatccgagcgacaatattccgggagttaaaggtatcggcgagaagacggcgctcaagctccttaaagaatgggggtcgttggagaacttgcttaagaatttagatcaggtcaaaccagagtcagtgcgtgagaagattcttgctcacctcgaagacctcaaattaagccgcgaattgtcccgtgtacgcaccgatttgccgctcgaagttgatttcggtcgccgccgcgaacctgactgggagggtcttaaagcgtttttagagcgtcttgaatttggttcgctcttgcatgaattcggccttttagaaagcccgttactggccgaagaagcaccttggccaccgcccgagggcgcgtttttaggttaccgtttgagtcgcccggaaccgatgtgggccgaattactggctcttgcagcgtctgcccagggacgtgtgtatcgcgcggaagaccctcatggtgcgctccgcggcctcttcgaagtccgtggactccttgccaaagacttagctgttgttgcattgcgcgaaggtcttgatttacctccgactgatgatccaatgcttcttgcgtacctcttggacccgtcatatacgacgcccgaaggcgtagcccgtcgttacggcggcgagtggaccgaagatgcagcgaaacgcgcgttattggccgaacgtttgcacgaaaatttattaggacgtttgcaaggcgaggaacgtctcctctggctttacgaagaagtggagaaaccattgagtcgcgtgctcgcgcatatggaagctaccggtgtcaaattagacgtggcgtatttggagaatctcagccttgaagttgctgcccacatgcgccgcttggaggaagaagtattccgtttagcaggccgttcctttcgccttaactctcgcgatcagttagaacgtgtgttgttcgatgaacttggtctccctcctatcggcaagacagagaagaccggtaaacgtagcacttcagcggcggttttagaagctcttcgcgaagtccatcccattgtggacaagatcttgcagtaccgcgaaatggcgaaattgaaaggcacctatattgaccgtcttccggcattagtccacccgaaaacgggacgcctccatacccgcttcaaccaaacagccacggcgaccggtcgtttgtcctcctctgatccaaaccttcagaatattccagtacgtaccccattgggccagaagatccgccgtgcgtttgtagctgaggagggttggcgtttagtggccctcgattatcgtcaaattgaattacgtgtccttgcccatctttctggcgatgagaacctcatccgcgtgtttcaggaaggcaaagacattcacactcaaacggcaagctggatgtttggattatcagctgaagcgatcgatcctttgatgcgtcgtgcagcgaagaccatcaatttcggtgttctctacggtatgagtgcctttcgtttgtcgcaggaattaggcattccctatgaagaagctcaggcgttcattcagaaatactttcaaagctatcccaaagttaaagcatggatcgagaagactctccgtgaaggccgcacacgtggttacgtagagaccttatttggacgtcgccgctatgttcccgatttaaacgctcgcgtgaaaggcaagcgtgaagccgccgaacgcatggcgttcaacatgcctgtacagggcacggcagctgacctcatgaaacttgcaatggtgcgcctttttccacaattgcgtgaagttggtgcccgcatgctcttgcaggtccacgatgaactcttgttagaagcgccaaaagagcgtgcggaagaggtggcagccctcgcgaaagaagttatggaaggcgtgtggcccttagcggtgcctcttgaagtcgaagttggtattggcgaggattggctggctgccaaagga

SEQ ID NO: 6288 - protein, 841 aa, synthetic construct
  REGION 1..841: note = Variant of DNA polymerase I from Thermus sp. strain 2.9
MHHHHHHGGSGVLPVFEPKGRVLLVDGHHLAYRNFFALKGLTTSLGEPVQGVYGFAKSLLKALKEDGDVVIVVFDAKAPSFRHEAYEAYKAGRAPTPEDFPRQLALMKELVDLLGLERLEVPGFEADDVLATLAKKAEREGYEVQILTADRDLFQLLSPRISVLHPEGHRITPEWLWEKYGLRPEQWVDFRALAGDPSDNIPGVKGIGEKTALKLLKEWGSLENLLKNLDQVKPESVREKILAHLEDLKLSRELSRVRTDLPLEVDFGRRREPDWEGLKAFLERLEFGSLLHEFGLLESPLLAEEAPWPPPEGAFLGYRLSRPEPMWAELLALAASAQGRVYRAEDPHGALRGLFEVRGLLAKDLAVVALREGLDLPPTDDPMLLAYLLDPSYTTPEGVARRYGGEWTEDAAKRALLAERLHENLLGRLQGEERLLWLYEEVEKPLSRVLAHMEATGVKLDVAYLENLSLEVAAHMRRLEEEVFRLAGRSFRLNSRDQLERVLFDELGLPPIGKTEKTGKRSTSAAVLEALREVHPIVDKILQYREMAKLKGTYIDRLPALVHPKTGRLHTRFNQTATATGRLSSSDPNLQNIPVRTPLGQKIRRAFVAEEGWRLVALDYRQIELRVLAHLSGDENLIRVFQEGKDIHTQTASWMFGLSAEAIDPLMRRAAKTINFGVLYGMSAFRLSQELGIPYEEAQAFIQKYFQSYPKVKAWIEKTLREGRTRGYVETLFGRRRYVPDLNARVKGKREAAERMAFNMPVQGTAADLMKLAMVRLFPQLREVGARMLLQVHDELLLEAPKERAEEVAALAKEVMEGVWPLAVPLEVEVGIGEDWLAAKG

SEQ ID NO: 6289 - DNA, 2523 bp, synthetic construct
  misc_feature 1..2523: note = Variant of DNA polymerase I from Thermus sp. strain 2.9
  source 1..2523: mol_type = other DNA
atgcaccatcatcatcatcatggcggtagcggcgtgttaccggtgttcgagcctaaaggtcgcgtgcttctggttgatggccatcatctcgcgtatcgtaacttctttgccctgaaaggattaaccaccagcctgggcgagccggtacagggtgtctacggctttgcaaagtcgctcctgaaagctctgaaagaagacggtgatgtggtgattgttgtctttgatgcgaaagcgccaagttttcgccacgaagcgtacgaagcttacaaagccgggcgtgctccaacgccggaagactttcctcgccaattggcgcttatgaaggaattagtggatttgcttggcctcgaacgcttggaagttcccggtttcgaggcagacgacgtattagcgactctcgcaaagaaagccgaacgtgagggctatgaagtccagatcttgacagcagatcgcgatcttttccagcttttatctccgcgcatctcggtgttacacccggaagggcatcgtatcaccccggaatggctctgggagaaatatggtttgcgtcccgaacaatgggtggattttcgcgccttagcaggcgatccgagcgacaatattccgggagttaaaggtatcggcgagaagacggcgctcaagctccttaaagaatgggggtcgttggagaacttgcttaagaatttagatcaggtcaaaccagagtcagtgcgtgagaagattcttgctcacctcgaagacctcaaattaagccgcgaattgtcccgtgtacgcaccgatttgccgctcgaagttgatttcggtcgccgccgcgaacctgactgggagggtcttaaagcgtttttagagcgtcttgaatttggttcgctcttgcatgaattcggccttttagaaagcccgttactggccgaagaagcaccttggccaccgcccgagggcgcgtttttaggttaccgtttgagtcgcccggaaccgatgtgggccgaattactggctcttgcagcgtctgcccagggacgtgtgtatcgcgcggaagaccctcatggtgcgctccgcggcctcttcgaagtccgtggcctccttgccaaagacttagctgttgttgcattgcgcgaaggtcttgatttacctccgactgatgatccaatgcttcttgcgtacctcttggacccgtcaaacacgacgcccgaaggcgtagcccgtcgttacggcggcgagtggtgggaagatgcaggcaaacgcgcgttattggccgaacgtttgcacgaaaatttattaggacgtttgcaaggcgaggagcgtctccgttggctttacgaagaagtggagaaaccattgagtcgcgtgctcgcgcatatggaagctaccggtgtcaaattagacgtggcgtatttggagaatctcagccttgaagttgctgcccacatgcgccgcttggaggaagaagtattccgtttagcaggccgttcctttcgccttaactctcgcgatcagttagaacgtgtgttgttcgatgaacttggtctccctcctatcggcaagacagagaagaccggtaaacgtagcacttcagcggcggttttagaagctcttcgcgaagtccatcccattgtggacaagatcttgcagtaccgcgaaatggcgaaattgaaaggcacctatattgaccgtcttccggcattagtccacccgaaaacgggacgcctccatacccgcttcaaccaaacagccacggcgaccggtcgtttgtcctcctctgatccaaaccttcagaatattccagtacgtacctttttgggccagaagatccgccgtgcgtttgtagctgaggagggttggcgtttagtggccctcgattatcgtcaaattgaattacgtgtccttgcccatctttctggcgatgagaacctcatccgcgtgtttcaggaaggcaaagacattcacactcaaacggcaagctggatgtttggattatcagctgaagcgatcgatcctttgatgcgtcgtgcagcgaagaccatcaatttcggtgttctctacggtatgagtgcctttcgtttgtcgcaggaattaggcattccctatgaagaagctcaggcgttcattcagaaatactttcaaggctatcccaaagttaaagcatggatcgagaagactctccgtgaaggccgcacacgtggttacgtagagaccttatttggacgtcgccgctatgttcccgatttaaacgctcgcgtgaaaggcaagcgtgaagccgccgaacgcatggcgttcaacatgcctgtacagggcacggcagctgacctcatgaaacttgcaatggtgcgcctttttccacaattgcgtgaagttggtgcccgcatgctgttgcaggtccacgatgaactcttgttagaagcgccaaaagagcgtgcggaagaggtggcagccctcgcgaaagaagttatggaaggcgtgtggcccttagcggtgcctcttgaagtcgaagttggtattggcgaggattggctggctgccaaagga

SEQ ID NO: 6290 - protein, 841 aa, synthetic construct
  REGION 1..841: note = Variant of DNA polymerase I from Thermus sp. strain 2.9
MHHHHHHGGSGVLPVFEPKGRVLLVDGHHLAYRNFFALKGLTTSLGEPVQGVYGFAKSLLKALKEDGDVVIVVFDAKAPSFRHEAYEAYKAGRAPTPEDFPRQLALMKELVDLLGLERLEVPGFEADDVLATLAKKAEREGYEVQILTADRDLFQLLSPRISVLHPEGHRITPEWLWEKYGLRPEQWVDFRALAGDPSDNIPGVKGIGEKTALKLLKEWGSLENLLKNLDQVKPESVREKILAHLEDLKLSRELSRVRTDLPLEVDFGRRREPDWEGLKAFLERLEFGSLLHEFGLLESPLLAEEAPWPPPEGAFLGYRLSRPEPMWAELLALAASAQGRVYRAEDPHGALRGLFEVRGLLAKDLAVVALREGLDLPPTDDPMLLAYLLDPSNTTPEGVARRYGGEWWEDAGKRALLAERLHENLLGRLQGEERLRWLYEEVEKPLSRVLAHMEATGVKLDVAYLENLSLEVAAHMRRLEEEVFRLAGRSFRLNSRDQLERVLFDELGLPPIGKTEKTGKRSTSAAVLEALREVHPIVDKILQYREMAKLKGTYIDRLPALVHPKTGRLHTRFNQTATATGRLSSSDPNLQNIPVRTFLGQKIRRAFVAEEGWRLVALDYRQIELRVLAHLSGDENLIRVFQEGKDIHTQTASWMFGLSAEAIDPLMRRAAKTINFGVLYGMSAFRLSQELGIPYEEAQAFIQKYFQGYPKVKAWIEKTLREGRTRGYVETLFGRRRYVPDLNARVKGKREAAERMAFNMPVQGTAADLMKLAMVRLFPQLREVGARMLLQVHDELLLEAPKERAEEVAALAKEVMEGVWPLAVPLEVEVGIGEDWLAAKG

SEQ ID NO: 6291 - DNA, 2523 bp, synthetic construct
  misc_feature 1..2523: note = Variant of DNA polymerase I from Thermus sp. strain 2.9
  source 1..2523: mol_type = other DNA
atgcaccatcatcatcatcatggcggtagcggcgtgttaccggtgttcgagcctaaaggtcgcgtgcttctggttgatggccatcatctcgcgtatcgtaacttctttgccctgaaaggattaaccaccagcctgggcgagccggtacagggtgtctacggctttgcaaagtcgctcctgaaagctctgaaagaagacggtgatgtggtgattgttgtctttgatgcgaaagcgccaagttttcgccacgaagcgtacgaagcttacaaagccgggcgtgctccaacgccggaagactttcctcgccaattggcgcttatgaaggaattagtggatttgcttggcctcgaacgcttggaagttcccggtttcgaggcagacgacgtattagcgactctcgcaaagaaagccgaacgtgagggctatgaagtccagatcttgacagcagatcgcgatcttttccagcttttatctccgcgcatctcggtgttacacccggaagggcatcgtatcaccccggaatggctctgggagaaatatggtttgcgtcccgaacaatgggtggattttcgcgccttagcaggcgatccgagcgacaatattccgggagttaaaggtatcggcgagaagacggcgctcaagctccttaaagaatgggggtcgttggagaacttgcttaagaatttagatcaggtcaaaccagagtcagtgcgtgagaagattcttgctcacctcgaagacctcaaattaagccgcgaattgtcccgtgtacgcaccgatttgccgctcgaagttgatttcggtcgccgccgcgaacctgactgggagggtcttaaagcgtttttagagcgtcttgaatttggttcgctcttgcatgaattcggccttttagaaagcccgttactggccgaagaagcaccttggccaccgcccgagggcgcgtttttaggttaccgtttgagtcgcccggaaccgatgtgggccgaattactggctcttgcagcgtctgcccagggacgtgtgtatcgcgcggaagaccctcatggtgcgctccgcggcctcttcgaagtccgtggactccttgccaaagacttagctgttgttgcattgcgcgaaggtcttgatttacctccgactgatgatccaatgcttcttgcgtacctcttggacccgtcaaacacgacgcccgaaggcgtagcccgtcgttacggcggcgagtggaccgaagatgcatttaaacgcgcgttattggccgaacgtttgcacgaaaatttattaggacgtttgcaaggcgaggaacgtctcctctggctttacgaagaagtggagaaaccattgagtcgcgtgctcgcgcatatggaagctaccggtgtcaaattagacgtggcgtatttggagaatctcagccttgaagttgctgcccacatgcgccgcttggaggaagaagtattccgtttagcaggccgttcctttcgccttaactctcgcgatcagttagaacgtgtgttgttcgatgaacttggtctccctcctatcggcaagacagagaagaccggtaaacgtagcacttcagcggcggttttagaagctcttcgcgaagtccatcccattgtggacaagatcttgcagtaccgcgaaatggcgaaattgaaaggcacctatattgaccgtcttccggcattagtccacccgaaaacgggacgcctccatacccgcttcaaccaaacagccacggcgaccggtcgtttgtcctcctctgatccaaaccttcagaatattccagtacgtaccccattgggccagaagatccgccgtgcgtttgtagctgaggagggttggcgtttagtggccctcgattatcgtcaaattgaattacgtgtccttgcccatctttctggcgatgagaacctcatccgcgtgtttcaggaaggcaaagacattcacactcaaacggcaagctggatgtttggattatcagctgaagcgatcgatcctttgatgcgtcgtgcagcgaagaccatcaatttcggtgttctctacggtatgagtgcctttcgtttgtcgcaggaattaggcattccctatgaagaagctcaggcgttcattcagaaatactttcaaagctatcccaaagttaaagcatggatcgagaagactctccgtgaaggccgcacacgtggttacgtagagaccttatttggacgtcgccgctatgttcccgatttaaacgctcgcgtgaaaggcaagcgtgaagccgccgaacgcatggcgttcaacatgcctgtacagggcacggcagctgacctcatgaaacttgcaatggtgcgcctttttccacaattgcgtgaagttggtgcccgcatgctcttgcaggtccacgatgaactcttgttagaagcgccaaaagagcgtgcggaagaggtggcagccctcgcgaaagaagttatggaaggcgtgtggcccttagcggtgcctcttgaagtcgaagttggtattggcgaggattggctggctgccaaagga

SEQ ID NO: 6292 - protein, 841 aa, synthetic construct
  REGION 1..841: note = Variant of DNA polymerase I from Thermus sp. strain 2.9
MHHHHHHGGSGVLPVFEPKGRVLLVDGHHLAYRNFFALKGLTTSLGEPVQGVYGFAKSLLKALKEDGDVVIVVFDAKAPSFRHEAYEAYKAGRAPTPEDFPRQLALMKELVDLLGLERLEVPGFEADDVLATLAKKAEREGYEVQILTADRDLFQLLSPRISVLHPEGHRITPEWLWEKYGLRPEQWVDFRALAGDPSDNIPGVKGIGEKTALKLLKEWGSLENLLKNLDQVKPESVREKILAHLEDLKLSRELSRVRTDLPLEVDFGRRREPDWEGLKAFLERLEFGSLLHEFGLLESPLLAEEAPWPPPEGAFLGYRLSRPEPMWAELLALAASAQGRVYRAEDPHGALRGLFEVRGLLAKDLAVVALREGLDLPPTDDPMLLAYLLDPSNTTPEGVARRYGGEWTEDAFKRALLAERLHENLLGRLQGEERLLWLYEEVEKPLSRVLAHMEATGVKLDVAYLENLSLEVAAHMRRLEEEVFRLAGRSFRLNSRDQLERVLFDELGLPPIGKTEKTGKRSTSAAVLEALREVHPIVDKILQYREMAKLKGTYIDRLPALVHPKTGRLHTRFNQTATATGRLSSSDPNLQNIPVRTPLGQKIRRAFVAEEGWRLVALDYRQIELRVLAHLSGDENLIRVFQEGKDIHTQTASWMFGLSAEAIDPLMRRAAKTINFGVLYGMSAFRLSQELGIPYEEAQAFIQKYFQSYPKVKAWIEKTLREGRTRGYVETLFGRRRYVPDLNARVKGKREAAERMAFNMPVQGTAADLMKLAMVRLFPQLREVGARMLLQVHDELLLEAPKERAEEVAALAKEVMEGVWPLAVPLEVEVGIGEDWLAAKG

SEQ ID NO: 6293 - DNA, 2523 bp, synthetic construct
  misc_feature 1..2523: note = Variant of DNA polymerase I from Thermus sp. strain 2.9
  source 1..2523: mol_type = other DNA
atgcaccatcatcatcatcatggcggtagcggcgtgttaccggtgttcgagcctaaaggtcgcgtgcttctggttgatggccatcatctcgcgtatcgtaacttctttgccctgaaaggattaaccaccagcctgggcgagccggtacagggtgtctacggctttgcaaagtcgctcctgaaagctctgaaagaagacggtgatgtggtgattgttgtctttgatgcgaaagcgccaagttttcgccacgaagcgtacgaagcttacaaagccgggcgtgctccaacgccggaagactttcctcgccaattggcgcttatgaaggaattagtggatttgcttggcctcgaacgcttggaagttcccggtttcgaggcagacgacgtattagcgactctcgcaaagaaagccgaacgtgagggctatgaagtccagatcttgacagcagatcgcgatcttttccagcttttatctccgcgcatctcggtgttacacccggaagggcatcgtatcaccccggaatggctctgggagaaatatggtttgcgtcccgaacaatgggtggattttcgcgccttagcaggcgatccgagcgacaatattccgggagttaaaggtatcggcgagaagacggcgctcaagctccttaaagaatgggggtcgttggagaacttgcttaagaatttagatcaggtcaaaccagagtcagtgcgtgagaagattcttgctcacctcgaagacctcaaattaagccgcgaattgtcccgtgtacgcaccgatttgccgctcgaagttgatttcggtcgccgccgcgaacctgactgggagggtcttaaagcgtttttagagcgtcttgaatttggttcgctcttgcatgaattcggccttttagaaagcccgttactggccgaagaagcaccttggccaccgcccgagggcgcgtttttaggttaccgtttgagtcgcccggaaccgatgtgggccgaattactggctcttgcagcgtctgcccagggacgtgtgtatcgcgcggaagaccctcatggtgcgctccgcggcctcttcgaagtccgtggactccttgccaaagacttagctgttgttgcattgcgcgaaggtcttgatttacctccgactgatgatccaatgcttcttgcgtacctcttggacccgtcaaacacgacgcccgaaggcgtagcccgtcgttacggcggcgagtggaccgaagatgcagcgaaacgcgcgttattggccgaacgtttgcacgaaaatttattaggacgtttgcaaggcgaggaacgtctcctctggctttacgaagaagtggagaaaccattgagtcgcgtgctcgcgcatatggaagctaccggtgtcaaattagacgtggcgtatttggagaatctcagccttgaagttgctgcccacatgcgccgcttggaggaagaagtattccgtttagcaggccgttcctttcgccttaactctcgcgatcagttagaacgtgtgttgttcgatgaacttggtctccctcctatcggcaagacagagaagaccggtaaacgtagcacttcagcggcggttttagaagctcttcgcgaagtccatcccattgtggacaagatcttgcagtaccgcgaaatggcgaaattgaaaggcacctatattgaccgtcttccggcattagtccacccgaaaacgggacgcctccatacccgcttcaaccaaacagccacggcgaccggtcgtttgtcctcctctgatccaaaccttcagaatattccagtacgtaccccattgggccagggtatccgccgtgcgtttgtagctgaggagggttggcgtttagtggccctcgattatcgtcaaattgaattacgtgtccttgcccatctttctggcgatgagaacctcatccgcgtgtttcaggaaggcaaagacattcacactcaaacggcaagctggatgtttggattatcagctgaagcgatcgatcctttgatgcgtcgtgcagcgaagaccatcaatttcggtgttctctacggtatgagtgcctttcgtttgtcgcaggaattaggcattccctatgaagaagctcaggcgttcattcagaaatactttcaaagctatcccaaagttaaagcatggatcgagaagactctccgtgaaggccgcacacgtggttacgtagagaccttatttggacgtcgccgctatgttcccgatttaaacgctcgcgtgaaaggcaagcgtgaagccgccgaacgcatggcgttcaacatgcctgtacagggcacggcagctgacctcatgaaacttgcaatggtgcgcctttttccacaattgcgtgaagttggtgcccgcatgctcttgcaggtccacgatgaactcttgttagaagcgccaaaagagcgtgcggaagaggtggcagccctcgcgaaagaagttatggaaggcgtgtggcccttagcggtgcctcttgaagtcgaagttggtattggcgaggattggctggctgccaaagga

SEQ ID NO: 6294 - protein, 841 aa, synthetic construct
  REGION 1..841: note = Variant of DNA polymerase I from Thermus sp. strain 2.9
MHHHHHHGGSGVLPVFEPKGRVLLVDGHHLAYRNFFALKGLTTSLGEPVQGVYGFAKSLLKALKEDGDVVIVVFDAKAPSFRHEAYEAYKAGRAPTPEDFPRQLALMKELVDLLGLERLEVPGFEADDVLATLAKKAEREGYEVQILTADRDLFQLLSPRISVLHPEGHRITPEWLWEKYGLRPEQWVDFRALAGDPSDNIPGVKGIGEKTALKLLKEWGSLENLLKNLDQVKPESVREKILAHLEDLKLSRELSRVRTDLPLEVDFGRRREPDWEGLKAFLERLEFGSLLHEFGLLESPLLAEEAPWPPPEGAFLGYRLSRPEPMWAELLALAASAQGRVYRAEDPHGALRGLFEVRGLLAKDLAVVALREGLDLPPTDDPMLLAYLLDPSNTTPEGVARRYGGEWTEDAAKRALLAERLHENLLGRLQGEERLLWLYEEVEKPLSRVLAHMEATGVKLDVAYLENLSLEVAAHMRRLEEEVFRLAGRSFRLNSRDQLERVLFDELGLPPIGKTEKTGKRSTSAAVLEALREVHPIVDKILQYREMAKLKGTYIDRLPALVHPKTGRLHTRFNQTATATGRLSSSDPNLQNIPVRTPLGQGIRRAFVAEEGWRLVALDYRQIELRVLAHLSGDENLIRVFQEGKDIHTQTASWMFGLSAEAIDPLMRRAAKTINFGVLYGMSAFRLSQELGIPYEEAQAFIQKYFQSYPKVKAWIEKTLREGRTRGYVETLFGRRRYVPDLNARVKGKREAAERMAFNMPVQGTAADLMKLAMVRLFPQLREVGARMLLQVHDELLLEAPKERAEEVAALAKEVMEGVWPLAVPLEVEVGIGEDWLAAKG

SEQ ID NO: 6295 - DNA, 2523 bp, synthetic construct
  misc_feature 1..2523: note = Variant of DNA polymerase I from Thermus sp. strain 2.9
  source 1..2523: mol_type = other DNA
atgcaccatcatcatcatcatggcggtagcggcgtgttaccggtgttcgagcctaaaggtcgcgtgcttctggttgatggccatcatctcgcgtatcgtaacttctttgccctgaaaggattaaccaccagcctgggcgagccggtacagggtgtctacggctttgcaaagtcgctcctgaaagctctgaaagaagacggtgatgtggtgattgttgtctttgatgcgaaagcgccaagttttcgccacgaagcgtacgaagcttacaaagccgggcgtgctccaacgccggaagactttcctcgccaattggcgcttatgaaggaattagtggatttgcttggcctcgaacgcttggaagttcccggtttcgaggcagacgacgtattagcgactctcgcaaagaaagccgaacgtgagggctatgaagtccagatcttgacagcagatcgcgatcttttccagcttttatctccgcgcatctcggtgttacacccggaagggcatcgtatcaccccggaatggctctgggagaaatatggtttgcgtcccgaacaatgggtggattttcgcgccttagcaggcgatccgagcgacaatattccgggagttaaaggtatcggcgagaagacggcgctcaagctccttaaagaatgggggtcgttggagaacttgcttaagaatttagatcaggtcaaaccagagtcagtgcgtgagaagattcttgctcacctcgaagacctcaaattaagccgcgaattgtcccgtgtacgcaccgatttgccgctcgaagttgatttcggtcgccgccgcgaacctgactgggagggtcttaaagcgtttttagagcgtcttgaatttggttcgctcttgcatgaattcggccttttagaaagcccgttactggccgaagaagcaccttggccaccgcccgagggcgcgtttttaggttaccgtttgagtcgcccggaaccgatgtgggccgaattactggctcttgcagcgtctgcccagggacgtgtgtatcgcgcggaagaccctcatggtgcgctccgcggcctcttcgaagtccgtggactccttgccaaagacttagctgttgttgcattgcgcgaaggtcttgatttacctccgactgatgatccaatgcttcttgcgtacctcttggacccgtcaaacacgacgcccgaaggcgtagcccgtcgttacggcggcgagtggaccgaagatgcagcgaaacgcgcgttattggccgaacgtttgcacgaaaatttattaggacgtttgcaaggcgaggaacgtctcctctggctttacgaagaagtggagaaaccattgagtcgcgtgctcgcgcatatggaagctaccggtgtcaaattagacgtggcgtatttggagaatctcagccttgaagttgctgcccacatgcgccgcttggaggaagaagtattccgtttagcaggccgttcctttcgccttaactctcgcgatcagttagaacgtgtgttgttcgatgaacttggtctccctcctatcggcaagacagagaagaccggtaaacgtagcacttcagcggcggttttagaagctcttcgcgaagtccatcccattgtggacaagatcttgcagtaccgcgaaatggcgaaattgaaaggcacctatattgaccgtcttccggcattagtccacccgaaaacgggacgcctccatacccgcttcaaccaaacagccacggcgaccggtcgtttgtcctcctctgatccaaaccttcagaatattccagtacgtaccccattgggccagaagatccgccgtgcgtttgtagctgaggagggttggcgtttagtggccctcgattatcgtcaaattgaattacgtgtccttgcccatctttctggcgatgagaacctcatccgcgtgtttcaggaaggcaaagacattcacactcaaacggcaagctggatgtttggattatcagctgaagcgatcgatcctttgatgcgtcgtgcagcgaagaccatcaatttcggtgttctctacggtatgagtgcctttcgtttgtcgcaggaattaggcattccctatgaagaagctcaggcgttcattcagaaatactttcaaagctatcccaaagttaaagcatggatcgagaagactctccgtgaaggccgcacacgtggttacgtagagaccttatttggacgtcgccgctatgttcccgatttaaaccatcgcgtgaaaggcaagcgtgaagccgccgaacgcatggcgttcaacatgcctgtacagggcacggcagctgacctcatgaaacttgcaatggtgcgcctttttccacaattgcgtgaagttggtgcccgcatgctcttgcaggtccacgatgaactcttgttagaagcgccaaaagagcgtgcggaagaggtggcagccctcgcgaaagaagttatggaaggcgtgtggcccttagcggtgcctcttgaagtcgaagttggtattggcgaggattggctggctgccaaagga

SEQ ID NO: 6296 - protein, 841 aa, synthetic construct
  REGION 1..841: note = Variant of DNA polymerase I from Thermus sp. strain 2.9
MHHHHHHGGSGVLPVFEPKGRVLLVDGHHLAYRNFFALKGLTTSLGEPVQGVYGFAKSLLKALKEDGDVVIVVFDAKAPSFRHEAYEAYKAGRAPTPEDFPRQLALMKELVDLLGLERLEVPGFEADDVLATLAKKAEREGYEVQILTADRDLFQLLSPRISVLHPEGHRITPEWLWEKYGLRPEQWVDFRALAGDPSDNIPGVKGIGEKTALKLLKEWGSLENLLKNLDQVKPESVREKILAHLEDLKLSRELSRVRTDLPLEVDFGRRREPDWEGLKAFLERLEFGSLLHEFGLLESPLLAEEAPWPPPEGAFLGYRLSRPEPMWAELLALAASAQGRVYRAEDPHGALRGLFEVRGLLAKDLAVVALREGLDLPPTDDPMLLAYLLDPSNTTPEGVARRYGGEWTEDAAKRALLAERLHENLLGRLQGEERLLWLYEEVEKPLSRVLAHMEATGVKLDVAYLENLSLEVAAHMRRLEEEVFRLAGRSFRLNSRDQLERVLFDELGLPPIGKTEKTGKRSTSAAVLEALREVHPIVDKILQYREMAKLKGTYIDRLPALVHPKTGRLHTRFNQTATATGRLSSSDPNLQNIPVRTPLGQKIRRAFVAEEGWRLVALDYRQIELRVLAHLSGDENLIRVFQEGKDIHTQTASWMFGLSAEAIDPLMRRAAKTINFGVLYGMSAFRLSQELGIPYEEAQAFIQKYFQSYPKVKAWIEKTLREGRTRGYVETLFGRRRYVPDLNHRVKGKREAAERMAFNMPVQGTAADLMKLAMVRLFPQLREVGARMLLQVHDELLLEAPKERAEEVAALAKEVMEGVWPLAVPLEVEVGIGEDWLAAKG

SEQ ID NO: 6297 - DNA, 2523 bp, synthetic construct
  misc_feature 1..2523: note = Variant of DNA polymerase I from Thermus sp. strain 2.9
  source 1..2523: mol_type = other DNA
atgcaccatcatcatcatcatggcggtagcggcgtgttaccggtgttcgagcctaaaggtcgcgtgcttctggttgatggccatcatctcgcgtatcgtaacttctttgccctgaaaggattaaccaccagcctgggcgagccggtacagggtgtctacggctttgcaaagtcgctcctgaaagctctgaaagaagacggtgatgtggtgattgttgtctttgatgcgaaagcgccaagttttcgccacgaagcgtacgaagcttacaaagccgggcgtgctccaacgccggaagactttcctcgccaattggcgcttatgaaggaattagtggatttgcttggcctcgaacgcttggaagttcccggtttcgaggcagacgacgtattagcgactctcgcaaagaaagccgaacgtgagggctatgaagtccagatcttgacagcagatcgcgatcttttccagcttttatctccgcgcatctcggtgttacacccggaagggcatcgtatcaccccggaatggctctgggagaaatatggtttgcgtcccgaacaatgggtggattttcgcgccttagcaggcgatccgagcgacaatattccgggagttaaaggtatcggcgagaagacggcgctcaagctccttaaagaatgggggtcgttggagaacttgcttaagaatttagatcaggtcaaaccagagtcagtgcgtgagaagattcttgctcacctcgaagacctcaaattaagccgcgaattgtcccgtgtacgcaccgatttgccgctcgaagttgatttcggtcgccgccgcgaacctgactgggagggtcttaaagcgtttttagagcgtcttgaatttggttcgctcttgcatgaattcggccttttagaaagcccgttactggccgaagaagcaccttggccaccgcccgagggcgcgtttttaggttaccgtttgagtcgcccggaaccgatgtgggccgaattactggctcttgcagcgtctgcccagggacgtgtgtatcgcgcggaagaccctcatggtgcgctccgcggcctcttcgaagtccgtggactccttgccaaagacttagctgttgttgcattgcgcgaaggtcttgatttacctccgactgatgatccaatgcttcttgcgtacctcttggacccgtcaaacacgacgcccgaaggcgtagcccgtcgttacggcggcgagtggaccgaagatgcagcgaaacgcgcgttattggccgaacgtttgcacgaaaatttattaggacgtttgcaaggcgaggaacgtctcctctggctttacgaagaagtggagaaaccattgagtcgcgtgctcgcgcatatggaagctaccggtgtcaaattagacgtggcgtatttggagaatctcagccttgaagttgctgcccacatgcgccgcttggaggaagaagtattccgtttagcaggccgttcctttcgccttaactctcgcgatcagttagaacgtgtgttgttcgatgaacttggtctccctcctatcggcaagacagagaagaccggtaaacgtagcacttcagcggcggttttagaagctcttcgcgaagtccatcccattgtggacaagatcttgcagtaccgcgaaatggcgaaattgaaaggcacctatattgaccgtcttccggcattagtccacccgaaaacgggacgcctccatacccgcttcaaccaaacagccacggcgaccggtcgtttgtcctcctctgatccaaaccttcagaatattccagtacgtaccccattgggccagaagatccgccgtgcgtttgtagctgaggagggttggcgtttagtggccctcgattatcgtcaaattgaattacgtgtccttgcccatctttctggcgatgagaacctcatccgcgtgtttcaggaaggcaaagacattcacactcaaacggcaagctggatgtttggattatcagctgaagcgatcgatcctttgatgcgtcgtgcagcgaagaccatcaatttcggtgttctctacggtatgagtgcctttcgtttgtcgcaggaattaggcattccctatgaagaagctcaggcgttcattcagaaatactttcaaagctatcccaaagttaaagcatggatcgagaagactctccgtgaaggccgcacacgtggttacgtagagaccttatttggacgtcgccgctatgttcccgatttaaacgctcgcgtgaaaggcaagcgtgaagccgccgaacgcatggcgttcaacatgcctgtacagggcacggcaggggacctcatgaaacttgcaatggtgcgcctttttccacaattgcgtgaagttggtgcccgcatgctcttgcaggtccacgatgaactcttgttagaagcgccaaaagagcgtgcggaagaggtggcagccctcgcgaaagaagttatggaaggcgtgtggcccttagcggtgcctcttgaagtcgaagttggtattggcgaggattggctggctgccaaagga

SEQ ID NO: 6298 - protein, 841 aa, synthetic construct
  REGION 1..841: note = Variant of DNA polymerase I from Thermus sp. strain 2.9
MHHHHHHGGSGVLPVFEPKGRVLLVDGHHLAYRNFFALKGLTTSLGEPVQGVYGFAKSLLKALKEDGDVVIVVFDAKAPSFRHEAYEAYKAGRAPTPEDFPRQLALMKELVDLLGLERLEVPGFEADDVLATLAKKAEREGYEVQILTADRDLFQLLSPRISVLHPEGHRITPEWLWEKYGLRPEQWVDFRALAGDPSDNIPGVKGIGEKTALKLLKEWGSLENLLKNLDQVKPESVREKILAHLEDLKLSRELSRVRTDLPLEVDFGRRREPDWEGLKAFLERLEFGSLLHEFGLLESPLLAEEAPWPPPEGAFLGYRLSRPEPMWAELLALAASAQGRVYRAEDPHGALRGLFEVRGLLAKDLAVVALREGLDLPPTDDPMLLAYLLDPSNTTPEGVARRYGGEWTEDAAKRALLAERLHENLLGRLQGEERLLWLYEEVEKPLSRVLAHMEATGVKLDVAYLENLSLEVAAHMRRLEEEVFRLAGRSFRLNSRDQLERVLFDELGLPPIGKTEKTGKRSTSAAVLEALREVHPIVDKILQYREMAKLKGTYIDRLPALVHPKTGRLHTRFNQTATATGRLSSSDPNLQNIPVRTPLGQKIRRAFVAEEGWRLVALDYRQIELRVLAHLSGDENLIRVFQEGKDIHTQTASWMFGLSAEAIDPLMRRAAKTINFGVLYGMSAFRLSQELGIPYEEAQAFIQKYFQSYPKVKAWIEKTLREGRTRGYVETLFGRRRYVPDLNARVKGKREAAERMAFNMPVQGTAGDLMKLAMVRLFPQLREVGARMLLQVHDELLLEAPKERAEEVAALAKEVMEGVWPLAVPLEVEVGIGEDWLAAKG

SEQ ID NO: 6299 - DNA, 2523 bp, synthetic construct
  misc_feature 1..2523: note = Variant of DNA polymerase I from Thermus sp. strain 2.9
  source 1..2523: mol_type = other DNA
atgcaccatcatcatcatcatggcggtagcggcgtgttaccggtgttcgagcctaaaggtcgcgtgcttctggttgatggccatcatctcgcgtatcgtaacttctttgccctgaaaggattaaccaccagcctgggcgagccggtacagggtgtctacggctttgcaaagtcgctcctgaaagctctgaaagaagacggtgatgtggtgattgttgtctttgatgcgaaagcgccaagttttcgccacgaagcgtacgaagcttacaaagccgggcgtgctccaacgccggaagactttcctcgccaattggcgcttatgaaggaattagtggatttgcttggcctcgaacgcttggaagttcccggtttcgaggcagacgacgtattagcgactctcgcaaagaaagccgaacgtgagggctatgaagtccagatcttgacagcagatcgcgatcttttccagcttttatctccgcgcatctcggtgttacacccggaagggcatcgtatcaccccggaatggctctgggagaaatatggtttgcgtcccgaacaatgggtggattttcgcgccttagcaggcgatccgagcgacaatattccgggagttaaaggtatcggcgagaagacggcgctcaagctccttaaagaatgggggtcgttggagaacttgcttaagaatttagatcaggtcaaaccagagtcagtgcgtgagaagattcttgctcacctcgaagacctcaaattaagccgcgaattgtcccgtgtacgcaccgatttgccgctcgaagttgatttcggtcgccgccgcgaacctgactgggagggtcttaaagcgtttttagagcgtcttgaatttggttcgctcttgcatgaattcggccttttagaaagcccgttactggccgaagaagcaccttggccaccgcccgagggcgcgtttttaggttaccgtttgagtcgcccggaaccgatgtgggccgaattactggctcttgcagcgtctgcccagggacgtgtgtatcgcgcggaagaccctcatggtgcgctccgcggcctcttcgaagtccgtggactccttgccaaagacttagctgttgttgcattgcgcgaaggtcttgatttacctccgactgatgatccaatgcttcttgcgtacctcttggacccgtcaaacacgacgcccgaaggcgtagcccgtcgttacggcggcgagtggaccgaagatgcagcgaaacgcgcgttattggccgaacgtttgcacgaaaatttattaggacgtttgcaaggcgaggaacgtctcctctggctttacgaagaagtggagaaaccattgagtcgcgtgctcgcgcatatggaagctaccggtgtcaaattagacgtggcgtatttggagaatctcagccttgaagttgctgcccacatgcgccgcttggaggaagaagtattccgtttagcaggccgttcctttcgccttaactctcgcgatcagttagaacgtgtgttgttcgatgaacttggtctccctcctatcggctggacagagaagaccggtaaacgtagcacttcagcggcggttttagaagctcttcgcgaagtccatcccattgtggacaagatcttgcagtaccgcgaaatggcgaaattgaaaggcacctatattgaccgtcttccggcattagtccacccgaaaacgggacgcctccatacccgcttcaaccaaacagccacggcgaccggtcgtttgtcctcctctgatccaaaccttcagaatattccagtacgtaccccattgggccagaagatccgccgtgcgtttgtagctgaggagggttggcgtttagtggccctcgattatcgtcaaattgaattacgtgtccttgcccatctttctggcgatgagaacctcatccgcgtgtttcaggaaggcaaagacattcacactcaaacggcaagctggatgtttggattatcagctgaagcgatcgatcctttgatgcgtcgtgcagcgaagaccatcaatttcggtgttctctacggtatgagtgcctttcgtttgtcgcaggaattaggcattccctatgaagaagctcaggcgttcattcagaaatactttcaaagctatcccaaagttaaagcatggatcgagaagactctccgtgaaggccgcacacgtggttacgtagagaccttatttggacgtcgccgctatgttcccgatttaaacgctcgcgtgaaaggcaagcgtgaagccgccgaacgcatggcgttcaacatgcctgtacagggcacggcagctgacctcatgaaacttgcaatggtgcgcctttttccacaattgcgtgaagttggtgcccgcatgctcttgcaggtccacgatgaactcttgttagaagcgccaaaagagcgtgcggaagaggtggcagccctcgcgaaagaagttatggaaggcgtgtggcccttagcggtgcctcttgaagtcgaagttggtattggcgaggattggctggctgccaaagga

SEQ ID NO: 6300 - protein, 841 aa, synthetic construct
  REGION 1..841: note = Variant of DNA polymerase I from Thermus sp. strain 2.9
MHHHHHHGGSGVLPVFEPKGRVLLVDGHHLAYRNFFALKGLTTSLGEPVQGVYGFAKSLLKALKEDGDVVIVVFDAKAPSFRHEAYEAYKAGRAPTPEDFPRQLALMKELVDLLGLERLEVPGFEADDVLATLAKKAEREGYEVQILTADRDLFQLLSPRISVLHPEGHRITPEWLWEKYGLRPEQWVDFRALAGDPSDNIPGVKGIGEKTALKLLKEWGSLENLLKNLDQVKPESVREKILAHLEDLKLSRELSRVRTDLPLEVDFGRRREPDWEGLKAFLERLEFGSLLHEFGLLESPLLAEEAPWPPPEGAFLGYRLSRPEPMWAELLALAASAQGRVYRAEDPHGALRGLFEVRGLLAKDLAVVALREGLDLPPTDDPMLLAYLLDPSNTTPEGVARRYGGEWTEDAAKRALLAERLHENLLGRLQGEERLLWLYEEVEKPLSRVLAHMEATGVKLDVAYLENLSLEVAAHMRRLEEEVFRLAGRSFRLNSRDQLERVLFDELGLPPIGWTEKTGKRSTSAAVLEALREVHPIVDKILQYREMAKLKGTYIDRLPALVHPKTGRLHTRFNQTATATGRLSSSDPNLQNIPVRTPLGQKIRRAFVAEEGWRLVALDYRQIELRVLAHLSGDENLIRVFQEGKDIHTQTASWMFGLSAEAIDPLMRRAAKTINFGVLYGMSAFRLSQELGIPYEEAQAFIQKYFQSYPKVKAWIEKTLREGRTRGYVETLFGRRRYVPDLNARVKGKREAAERMAFNMPVQGTAADLMKLAMVRLFPQLREVGARMLLQVHDELLLEAPKERAEEVAALAKEVMEGVWPLAVPLEVEVGIGEDWLAAKG

SEQ ID NO: 6301 - DNA, 2523 bp, synthetic construct
  misc_feature 1..2523: note = Variant of DNA polymerase I from Thermus sp. strain 2.9
  source 1..2523: mol_type = other DNA
atgcaccatcatcatcatcatggcggtagcggcgtgttaccggtgttcgagcctaaaggtcgcgtgcttctggttgatggccatcatctcgcgtatcgtaacttctttgccctgaaaggattaaccaccagcctgggcgagccggtacagggtgtctacggctttgcaaagtcgctcctgaaagctctgaaagaagacggtgatgtggtgattgttgtctttgatgcgaaagcgccaagttttcgccacgaagcgtacgaagcttacaaagccgggcgtgctccaacgccggaagactttcctcgccaattggcgcttatgaaggaattagtggatttgcttggcctcgaacgcttggaagttcccggtttcgaggcagacgacgtattagcgactctcgcaaagaaagccgaacgtgagggctatgaagtccagatcttgacagcagatcgcgatcttttccagcttttatctccgcgcatctcggtgttacacccggaagggcatcgtatcaccccggaatggctctgggagaaatatggtttgcgtcccgaacaatgggtggattttcgcgccttagcaggcgatccgagcgacaatattccgggagttaaaggtatcggcgagaagacggcgctcaagctccttaaagaatgggggtcgttggagaacttgcttaagaatttagatcaggtcaaaccagagtcagtgcgtgagaagattcttgctcacctcgaagacctcaaattaagccgcgaattgtcccgtgtacgcaccgatttgccgctcgaagttgatttcggccgccgccgcgaacctgactgggagggtcttaaagcgtttttagagcgtcttgaatttggttcgctcttgcatgaattcggccttttagaaagcccgttactggccgaagaagcaccttggccaccgcccgagggcgcgtttttaggttaccgtttgagtcgcccggaaccgatgtgggccgaattactggctcttgcagcgtctgcccagggacgtgtgtatcgcgcggaagaccctcatggtgcgctccgcggcctcttcgaagtccgtggactccttgccaaagacttagctgttgttgcattgcgcgaaggtcttgatttacctccgactgatgatccaatgcttcttgcgtacctcttggacccgtcaaacacgacgcccgaaggcgtagcccgtcgttacggcggcgagtggaccgaagatgcagcgaaacgcgcgttattggccgaacgtttgcacgcaaatttattaggacgtttgcaaggcgaggaacgtctcctctggctttacgaagaagtggagaaaccattgagtcgcgtgctcgcgcatatggaagctaccggtgtcaaattagacgtggcgtatttggagaatcttcaccttgaagttgctgcccacatgcgccgcttggaggaagaagtattccgtttagcaggccactcctttcgccttaactctcgcgatcagttagaacgtgtgttgttcgatgaacttggtctccctcctatcggcaagacagagaagaccggtaaacgtagcacttcagcggcggttttagaagctcttcgcgaagtccatcccattgtggacaagatcttgcagtaccgcgaaatggcgaaattgaaaggcacctatattgaccctcttccggcattagtccacccgaaaacgggacgcctccatacccgcttcaaccaaacagccacggcgaccggtcgtttgtcctcctctgatccaaaccttcagaatattccagtacgtaccccattgggccagaagatccgccgtgcgtttgtagctgaggagggttggcgtttagtggccctcgattatagtcaaattgaattacgtgtccttgcccatctttctggcgatgagaacctcatccgcgtgtttcaggaaggcaaagacattcacactcaaacggcaagctggatgtttggattatcagctgaagcgatcgatcctttgatgcgtcgtgcagcgaagaccatcaatttcggtgttctctacggtatgagtgcctttcgtttgtcgcaggaattaggcattccctatgaagaagctcaggcgttcattcagaaatactttcaaagctatcccaaagttaaagcatggatcgagaagactctcgaggaaggccgcacacgtggttacgtagagaccttatttggacgtcgccgctatgttcccgatttaaacgctcgcgtgaaaggcgtacgtgaagccgccgaacgcatggcgttcaacatgcctgtacagggcacggcagctgacctcatgaaacttgcaatggtgcgcctttttccacaattgcgtgaagttggtgcccgcatgctcttgcaggtccacgatgaactcttgttagaagcgccaaaagagcgtgcggaagaggtggcagccctcgcgaaagaagttatggaaggcgtgtggcccttagcggtgcctcttgaagtcgaagttggtattggcgaggattggctggctgccaaagga

SEQ ID NO: 6302 - protein, 841 aa, synthetic construct
  REGION 1..841: note = Variant of DNA polymerase I from Thermus sp. strain 2.9
MHHHHHHGGSGVLPVFEPKGRVLLVDGHHLAYRNFFALKGLTTSLGEPVQGVYGFAKSLLKALKEDGDVVIVVFDAKAPSFRHEAYEAYKAGRAPTPEDFPRQLALMKELVDLLGLERLEVPGFEADDVLATLAKKAEREGYEVQILTADRDLFQLLSPRISVLHPEGHRITPEWLWEKYGLRPEQWVDFRALAGDPSDNIPGVKGIGEKTALKLLKEWGSLENLLKNLDQVKPESVREKILAHLEDLKLSRELSRVRTDLPLEVDFGRRREPDWEGLKAFLERLEFGSLLHEFGLLESPLLAEEAPWPPPEGAFLGYRLSRPEPMWAELLALAASAQGRVYRAEDPHGALRGLFEVRGLLAKDLAVVALREGLDLPPTDDPMLLAYLLDPSNTTPEGVARRYGGEWTEDAAKRALLAERLHANLLGRLQGEERLLWLYEEVEKPLSRVLAHMEATGVKLDVAYLENLHLEVAAHMRRLEEEVFRLAGHSFRLNSRDQLERVLFDELGLPPIGKTEKTGKRSTSAAVLEALREVHPIVDKILQYREMAKLKGTYIDPLPALVHPKTGRLHTRFNQTATATGRLSSSDPNLQNIPVRTPLGQKIRRAFVAEEGWRLVALDYSQIELRVLAHLSGDENLIRVFQEGKDIHTQTASWMFGLSAEAIDPLMRRAAKTINFGVLYGMSAFRLSQELGIPYEEAQAFIQKYFQSYPKVKAWIEKTLEEGRTRGYVETLFGRRRYVPDLNARVKGVREAAERMAFNMPVQGTAADLMKLAMVRLFPQLREVGARMLLQVHDELLLEAPKERAEEVAALAKEVMEGVWPLAVPLEVEVGIGEDWLAAKG

SEQ ID NO: 6303 - DNA, 2523 bp, synthetic construct
  misc_feature 1..2523: note = Variant of DNA polymerase I from Thermus sp. strain 2.9
  source 1..2523: mol_type = other DNA
atgcaccatcatcatcatcatggcggtagcggcgtgttaccggtgttcgagcctaaaggtcgcgtgcttctggttgatggccatcatctcgcgtatcgtaacttctttgccctgaaaggattaaccaccagccgcggcgagccggtacagggtgtctacggctttgcaaagtcgctcctgaaagctctgaaagaagacggtgatgtggtgattgttgtctttgatgcgaaagcgccaagttttcgccacgaagcgtacgaagcttacaaagccgggcgtgctccaacgccggaagactttcctcgccaattggcgcttatgaaggaattagtggatttgcttggcctcgaacgcttggaagttcccggtttcgaggcagacgacgtattagcgactctcgcaaagaaagccgaacgtgagggctatgaagtccagatcttgacagcagatcgcgatcttttccagcttttatctccgcgcatctcggtgttacacccggaagggcatcgtatcaccccggaatggctctgggagaaatatggtttgcgtcccgaacaatgggtggattttcgcgccttagcaggcgatccgagcgacaatattccgggagttaaaggtatcggcgagaagacggcgctcaagctccttaaagaatgggggtcgttggagaacttgcttaagaatttagatcaggtcaaaccagagtcagtgcgtgagaagattcttgctcacctcgaagacctcaaattaagccgcgaattgtcccgtgtacgcaccgatttgccgctcgaagttgatttcggccgccgccgcgaacctgactgggagggtcttaaagcgtttttagagcgtcttgaatttggttcgctcttgcatgaattcggccttttagaaagcccgttaccggccgaagaagcaccttggccaccgcccgagggcgcgtttttaggttaccgtttgagtcgcccggaaccgatgtgggccgaattactggctcttgcagcgtctgcccagggacgtgtgtatcgcgcggaagaccctcatggtgcgctccgcggcctcttcgaagtccgtggactccttgccaaagacttagctgttgttgcattgcgcgaaggtcttgatttacctccgactgatgatccaatgcttcttgcgtacctcttggacccgtcaaacacgacgcccgaaggcgtagcccgtcgttacggcggcgagtggaccgaagatgcagcgaaacgcgcgttattggccgaacgtttgcacgaaaatttattaggacgtttgcaaggcgaggaacgtctcctctggctttacgaagaagtggagaaaccattgagtcgcgtgctcgcgcatatggaagctaccggtgtcaaattagacgtggcgtatttggagaatctcagccttgaagttgctgcccatatgcgccgcttggaggaagaagtattccgtttagcaggccgctcctttcgccttaactctcgcgatcagttagaacgtgtgttgttcgatgaacttggtctccctcctatcggcaagacagagaagaccggtaaacgtagcacttcagcggcggttttagaagctcttcgcgaagtccatcccattgtggacaagatcttgcagtaccgcgaaatggcgaaattgaaaggcacctatattgaccgtcttccggcattagtccacccgaaaacgggacgcctccatacccgcttcaaccaaacagccacggcgaccggtcgtttgtccagttctgatccaaaccttcagaatattccagtacgtaccccattgggccagaagatccgccgtgcgtttgtagctgaggagggttggcgtttagtggccctcgattatagtcaaattgaattacgtgtccttgcccatctttctggcgatgagaacctcatccgcgtgtttcaggaaggcaaagacattcacactcaaacggcaagctggatgtttggattatcagctgaagcgatcgatcctttgatgcgtcgtgcagcgaagaccatcaatttcggtgttctctacggtatgagtgcctttcgtttgtcgcaggaattaggcattccctatgaagaagctcaggcgttcattcagaaatactttcaaagctatcccaaagttaaagcatggatcgagaagactctccgcgaaggccgcacacgtggttacgtagagaccttatttggacgtcgccgctatgttcccgatttaaacgctcgcgtgaaaggcaaacgtgaagccgccgaacgcatggcgttcaacatgcctgtacagggcacggcagctgacctcatgaaacttgcaatggtgcgcctttttccacaattgcgtgaagttggtgcccgcatgctcttgcaggtccacgatgaactcttgttagaagcgccaaaagagcgtgcggaagaggtggcagccctcgcgaaagaagttatggaaggcgtgtggcccttagcggtgcctcttgaagtcgaagttggtattggcgaggattggctggctgccaaagga

SEQ ID NO: 6304 - protein, 841 aa, synthetic construct
  REGION 1..841: note = Variant of DNA polymerase I from Thermus sp. strain 2.9
MHHHHHHGGSGVLPVFEPKGRVLLVDGHHLAYRNFFALKGLTTSRGEPVQGVYGFAKSLLKALKEDGDVVIVVFDAKAPSFRHEAYEAYKAGRAPTPEDFPRQLALMKELVDLLGLERLEVPGFEADDVLATLAKKAEREGYEVQILTADRDLFQLLSPRISVLHPEGHRITPEWLWEKYGLRPEQWVDFRALAGDPSDNIPGVKGIGEKTALKLLKEWGSLENLLKNLDQVKPESVREKILAHLEDLKLSRELSRVRTDLPLEVDFGRRREPDWEGLKAFLERLEFGSLLHEFGLLESPLPAEEAPWPPPEGAFLGYRLSRPEPMWAELLALAASAQGRVYRAEDPHGALRGLFEVRGLLAKDLAVVALREGLDLPPTDDPMLLAYLLDPSNTTPEGVARRYGGEWTEDAAKRALLAERLHENLLGRLQGEERLLWLYEEVEKPLSRVLAHMEATGVKLDVAYLENLSLEVAAHMRRLEEEVFRLAGRSFRLNSRDQLERVLFDELGLPPIGKTEKTGKRSTSAAVLEALREVHPIVDKILQYREMAKLKGTYIDRLPALVHPKTGRLHTRFNQTATATGRLSSSDPNLQNIPVRTPLGQKIRRAFVAEEGWRLVALDYSQIELRVLAHLSGDENLIRVFQEGKDIHTQTASWMFGLSAEAIDPLMRRAAKTINFGVLYGMSAFRLSQELGIPYEEAQAFIQKYFQSYPKVKAWIEKTLREGRTRGYVETLFGRRRYVPDLNARVKGKREAAERMAFNMPVQGTAADLMKLAMVRLFPQLREVGARMLLQVHDELLLEAPKERAEEVAALAKEVMEGVWPLAVPLEVEVGIGEDWLAAKG

SEQ ID NO: 6305 - DNA, 2523 bp, synthetic construct
  misc_feature 1..2523: note = Variant of DNA polymerase I from Thermus sp. strain 2.9
  source 1..2523: mol_type = other DNA
atgcaccatcatcatcatcatggcggtagcggcgtgttaccggtgttcgagcctaaaggtcgcgtgcttctggttgatggccatcatctcgcgtatcgtaacttctttgccctgaaaggattaaccaccagcctgggcgagccggtacagggtgtctacggctttgcaaagtcgctcctgaaagctctgaaagaagacggtgatgtggtgattgttgtctttgatgcgaaagcgccaagttttcgccacgaagcgtacgaagcttacaaagccgggcgtgctccaacgccggaagactttcctcgccaattggcgcttatgaaggaattagtggatttgcttggcctcgaacgcttggaagttcccggtttcgaggcagacgacgtattagcgactctcgcaaagaaagccgaacgtgagggctatgaagtccagatcttgacagcagatcgcgatcttttccagcttttatctccgcgcatctcggtgttacacccggaagggcatcgtatcaccccggaatggctctgggagaaatatggtttgcgtcccgaacaatgggtggattttcgcgccttagcaggcgatccgagcgacaatattccgggagttaaaggtatcggcgagaagacggcgctcaagctccttaaagaatgggggtcgttggagaacttgcttaagaatttagatcaggtcaaaccagagtcagtgcgtgagaagattcttgctcacctcgaagacctcaaattaagccgcgaattgtcccgtgtacgcaccgatttgccgctcgaagttgatttcggtcgccgccgcgaacctgactgggagggtcttaaagcgtttttagagcgtcttgaatttggttcgctcttgcatgaattcggccttttagaaagcccgttactggccgaagaagcaccttggccaccgcccgagggcgcgtttttaggttaccgtttgagtcgcccggaaccgatgtgggccgaattactggctcttgcagcgtctgcccagggacgtgtgtatcgcgcggaagaccctcatggtgcgctccgcggcctcttcgaagtccgtggactccttgccaaagacttagctgttgttgcattgcgcgaaggtcttgatttacctccgactgatgatccaatgcttcttgcgtacctcttggacccgtcaaacacgacgcccgaaggcgtagcccgtcgttacggcggcgagtggtgggaagatgcaggcaaacgcgcgttattggccgaacgtttgcacgaaaatttattaggacgtttgcaaggcgaggcgcgtctcctgtggctttacgaagaagtggagaaaccattgagtcgcgtgctcgcgcatatggaagctaccggtgtcaaattagacgtggcgtatttggagaatctcagccttgaagttgctgcccacatgcgccgcttggaggaagaagtattccgtttagcaggccgttcctttcgccttaactctcgcgatcagttagaacgtgtgttgttcgatgaacttggtctccctcctatcggcaagacagagaagaccggtaaacgtagcacttcagcggcggttttagaagctcttcgcgaagtccatcccattgtggacaagatcttgcagtaccgcgaaatggcgaaattgaaaggcacctatattgaccgtcttccggcattagtccacccgaaaacgggacgcctccatacccgcttcaaccaaacagccacggcgaccggtcgtttgtcctcctctgatccaaaccttcagaatattccagtacgtacctttttgggccagaagatccgccgtgcgtttgtagctgagccgggttggcgtttagtggccctcgattatcgtcaaattgaattacgtgtccttgcccatctttctggcgatgagaacctcatccgcgtgtttcaggaaggcaaagacattcacactcaaacggcaagctggatgtttggattatcagctgaagcgatcgatcctttgatgcgtcgtgcagcgaagaccatcaatttcggtgttctctacggtatgagtgcctttcgtttgtcgcaggaattaggcattccctatgaagaagctcagggtttcattcagaaatactttcaaggctatcccaaagttaaagcatggatcgagaagactctccgtgaaggccgcacacgtggttacgtagagaccttatttggacgtcgccgctatgttcccgatttaaactcgcgcgtgaaaggcaagcgtgaagccgccgaacgcatggcgttcaacatgcctgtacagggcacggcagctgacctcatgaaacttgcaatggtgcgcctttttccacaattgcgtgaagttggtgcccgcatgctgttgcaggtccacgatgaactcttgttagaagcgccaaaagagcgtgcggaagaggtggcagccctcgcgaaagaagttatggaaggcgtgtggcccttagcggtgcctcttgaagtcgaagttggtattggcgaggattggctggctgccaaagga

SEQ ID NO: 6306 - protein, 841 aa, synthetic construct
  REGION 1..841: note = Variant of DNA polymerase I from Thermus sp. strain 2.9
MHHHHHHGGSGVLPVFEPKGRVLLVDGHHLAYRNFFALKGLTTSLGEPVQGVYGFAKSLLKALKEDGDVVIVVFDAKAPSFRHEAYEAYKAGRAPTPEDFPRQLALMKELVDLLGLERLEVPGFEADDVLATLAKKAEREGYEVQILTADRDLFQLLSPRISVLHPEGHRITPEWLWEKYGLRPEQWVDFRALAGDPSDNIPGVKGIGEKTALKLLKEWGSLENLLKNLDQVKPESVREKILAHLEDLKLSRELSRVRTDLPLEVDFGRRREPDWEGLKAFLERLEFGSLLHEFGLLESPLLAEEAPWPPPEGAFLGYRLSRPEPMWAELLALAASAQGRVYRAEDPHGALRGLFEVRGLLAKDLAVVALREGLDLPPTDDPMLLAYLLDPSNTTPEGVARRYGGEWWEDAGKRALLAERLHENLLGRLQGEARLLWLYEEVEKPLSRVLAHMEATGVKLDVAYLENLSLEVAAHMRRLEEEVFRLAGRSFRLNSRDQLERVLFDELGLPPIGKTEKTGKRSTSAAVLEALREVHPIVDKILQYREMAKLKGTYIDRLPALVHPKTGRLHTRFNQTATATGRLSSSDPNLQNIPVRTFLGQKIRRAFVAEPGWRLVALDYRQIELRVLAHLSGDENLIRVFQEGKDIHTQTASWMFGLSAEAIDPLMRRAAKTINFGVLYGMSAFRLSQELGIPYEEAQGFIQKYFQGYPKVKAWIEKTLREGRTRGYVETLFGRRRYVPDLNSRVKGKREAAERMAFNMPVQGTAADLMKLAMVRLFPQLREVGARMLLQVHDELLLEAPKERAEEVAALAKEVMEGVWPLAVPLEVEVGIGEDWLAAKG

SEQ ID NO: 6307 - DNA, 2523 bp, synthetic construct
  misc_feature 1..2523: note = Variant of DNA polymerase I from Thermus sp. strain 2.9
  source 1..2523: mol_type = other DNA
atgcaccatcatcatcatcatggcggtagcggcgtgttaccggtgttcgagcctaaaggtcgcgtgcttctggttgatggccatcatctcgcgtatcgtaacttctttgccctgaaaggattaaccaccagcctgggcgagccggtacagggtgtctacggctttgcaaagtcgctcctgaaagctctgaaagaagacggtgatgtggtgattgttgtctttgatgcgaaagcgccaagttttcgccacgaagcgtacgaagcttacaaagccgggcgtgctccaacgccggaagactttcctcgccaattggcgcttatgaaggaattagtggatttgcttggcctcgaacgcttggaagttcccggtttcgaggcagacgacgtattagcgactctcgcaaagaaagccgaacgtgagggctatgaagtccagatcttgacagcagatcgcgatcttttccagcttttatctccgcgcatctcggtgttacacccggaagggcatcgtatcaccccggaatggctctgggagaaatatggtttgcgtcccgaacaatgggtggattttcgcgccttagcaggcgatccgagcgacaatattccgggagttaaaggtatcggcgagaagacggcgctcaagctccttaaagaatgggggtcgttggagaacttgcttaagaatttagatcaggtcaaaccagagtcagtgcgtgagaagattcttgctcacctcgaagacctcaaattaagccgcgaattgtcccgtgtacgcaccgatttgccgctcgaagttgatttcggtcgccgccgcgaacctgactgggagggtcttaaagcgtttttagagcgtcttgaatttggttcgctcttgcatgaattcggccttttagaaagcccgttactggccgaagaagcaccttggccaccgcccgagggcgcgtttttaggttaccgtttgagtcgcccggaaccgatgtgggccgaattactggctcttgcagcgtctgcccagtctcgtgtgtatcgcgcggaagaccctcatggtgcgctccgcggcctcttcgaagtccgtggactccttgccaaagacttagctgttgttgcattgcgcgaaggtcttgatttacctccgactgatgatccaatgcttcttgcgtacctcttggacccgtcaaacacgacgcccgaaggcgtagcccgtcgttacggcggcgagtggaccgaagatgcagcgaaacgcgcgttattggccgaacgtttgcacgaaaatttattaggacgtttgcaaggcgaggaacgtctcctctggctttacgaagaagtggagaaaccattgagtcgcgtgctcgcgcatatggaagctaccggtgtcaaattagacgtggcgtatttggagaatctcagccttgaagttgctgcccacatgcgccgcttggaggaagaagtattccgtttagcaggccgttcctttcgccttaactctcgcgatcagttagaacgtgtgttgttcgatgaacttggtctccctcctatcggcaagacagagaagaccggtaaacgtagcacttcagcggcggttttagaagctcttcgcgaagtccatcccattgtggacaagatcttgcagtaccgcgaaatggcgaaattgaaaggcacctatattgaccgtcttccggcattagtccacccgaaaacgggacgcctccatacccgcttcaaccaaacagccacggcgaccggtcgtttgtcctcctctgatccaaaccttcagaatattccagtacgtaccccattgggccagaagatccgccgtgcgtttgtagctgaggagggttggcgtttagtggccctcgattatcgtcaaattgaattacgtgtccttgcccatctttctggcgatgagaacctcatccgcgtgtttcaggaaggcaaagacattcacactcaaacggcaagctggatgtttggattatcagctgaagcgatcgatcctttgatgcgtcgtgcagcgaagaccatcaatttcggtgttctctacggtatgagtgcctttcgtttgtcgcaggaattaggcattccctatgaagaagctcaggcgttcattcagaaatactttcaaagctatcccaaagttaaagcatggatcgagaagactctccgtgaaggccgcacacgtggttacgtagagaccttatttggacgtcgccgctatgttcccgatttaaacgctcgcgtgaaaggcaagcgtgaagccgccgaacgcatggcgttcaacatgcctgtacagggcacggcagctgacctcatgaaacttgcaatggtgcgcctttttccacaattgcgtgaagttggtgcccgcatgctcttgcaggtccacgatgaactcttgttagaagcgccaaaagagcgtgcggaagaggtggcagccctcgcgaaagaagttatggaaggcgtgtggcccttagcggtgcctcttgaagtcgaagttggtattggcgaggattggctggctgccaaagga

SEQ ID NO: 6308 - protein, 841 aa, synthetic construct
  REGION 1..841: note = Variant of DNA polymerase I from Thermus sp. strain 2.9
MHHHHHHGGSGVLPVFEPKGRVLLVDGHHLAYRNFFALKGLTTSLGEPVQGVYGFAKSLLKALKEDGDVVIVVFDAKAPSFRHEAYEAYKAGRAPTPEDFPRQLALMKELVDLLGLERLEVPGFEADDVLATLAKKAEREGYEVQILTADRDLFQLLSPRISVLHPEGHRITPEWLWEKYGLRPEQWVDFRALAGDPSDNIPGVKGIGEKTALKLLKEWGSLENLLKNLDQVKPESVREKILAHLEDLKLSRELSRVRTDLPLEVDFGRRREPDWEGLKAFLERLEFGSLLHEFGLLESPLLAEEAPWPPPEGAFLGYRLSRPEPMWAELLALAASAQSRVYRAEDPHGALRGLFEVRGLLAKDLAVVALREGLDLPPTDDPMLLAYLLDPSNTTPEGVARRYGGEWTEDAAKRALLAERLHENLLGRLQGEERLLWLYEEVEKPLSRVLAHMEATGVKLDVAYLENLSLEVAAHMRRLEEEVFRLAGRSFRLNSRDQLERVLFDELGLPPIGKTEKTGKRSTSAAVLEALREVHPIVDKILQYREMAKLKGTYIDRLPALVHPKTGRLHTRFNQTATATGRLSSSDPNLQNIPVRTPLGQKIRRAFVAEEGWRLVALDYRQIELRVLAHLSGDENLIRVFQEGKDIHTQTASWMFGLSAEAIDPLMRRAAKTINFGVLYGMSAFRLSQELGIPYEEAQAFIQKYFQSYPKVKAWIEKTLREGRTRGYVETLFGRRRYVPDLNARVKGKREAAERMAFNMPVQGTAADLMKLAMVRLFPQLREVGARMLLQVHDELLLEAPKERAEEVAALAKEVMEGVWPLAVPLEVEVGIGEDWLAAKG

SEQ ID NO: 6309 - DNA, 2523 bp, synthetic construct
  misc_feature 1..2523: note = Variant of DNA polymerase I from Thermus sp. strain 2.9
  source 1..2523: mol_type = other DNA
atgcaccatcatcatcatcatggcggtagcggcgtgttaccggtgttcgagcctaaaggtcgcgtgcttctggttgatggccatcatctcgcgtatcgtaacttctttgccctgaaaggattaaccaccagcctgggcgagccggtacagggtgtctacggctttgcaaagtcgctcctgaaagctctgaaagaagacggtgatgtggtgattgttgtctttgatgcgaaagcgccaagttttcgccacgaagcgtacgaagcttacaaagccgggcgtgctccaacgccggaagactttcctcgccaattggcgcttatgaaggaattagtggatttgcttggcctcgaacgcttggaagttcccggtttcgaggcagacgacgtattagcgactctcgcaaagaaagccgaacgtgagggctatgaagtccagatcttgacagcagatcgcgatcttttccagcttttatctccgcgcatctcggtgttacacccggaagggcatcgtatcaccccggaatggctctgggagaaatatggtttgcgtcccgaacaatgggtggattttcgcgccttagcaggcgatccgagcgacaatattccgggagttaaaggtatcggcgagaagacggcgctcaagctccttaaagaatgggggtcgttggagaacttgcttaagaatttagatcaggtcaaaccagagtcagtgcgtgagaagattcttgctcacctcgaagacctcaaattaagccgcgaattgtcccgtgtacgcaccgatttgccgctcgaagttgatttcggtcgccgccgcgaacctgactgggagggtcttaaagcgtttttagagcgtcttgaatttggttcgctcttgcatgaattcggccttttagaaagcccgttactggccgaagaagcaccttggccaccgcccgagggcgcgtttttaggttaccgtttgagtcgcccggaaccgatgtgggccgaattactggctcttgcagcgtctgcccagggacgtgtgtatcgcgcggaagaccctcatggtgcgctccgcggcctcttcgaagtccgtggactccttgccaaagacttagctgttgttgcattgcgcgaaggtcttgatttacctccgactgatgatccaatgcttcttgcgtacctcttggacccgtcaaacacgacgcccgaaggcgtagcccgtcgttacggcggcgagtggaccgaagatgcagcgaaacgcgcgttattggccgaacgtttgcacgaaaatttattaggacgtttgcaaggcgaggaacgtctcctctggctttacgaagaagtggagaaaccattgagtcgcgtgctcgcgcatatggaagctaccggtgtcaaattagacgtggcgtatttggagaatctcagccttgaagttgctgcccacatgcgccgcttggaggaagaagtattccgtttagcaggccgttcctttcgccttaactctcgcgatcagttagaacgtgtgttgttcgatgaacttggtctccctcctatcggcaagacagagaagaccggtaaacgtagcacttcagcggcggttttagaagctcttcgcgaagtccatcccattgtggacaagatcttgcagtaccgcgaaatggcgaaattgaaaggcacctatattgaccgtcttccggcattagtccacccgaaaacgggacgcctccatacccgcttcaaccaaacagccacggcgaccggtcgtttgtcctcctctgatccaaaccttcagaatattccagtacgtaccccattgggccagaagatccgccgtgcgtttgtagctgaggagggttggcgtttagtggccctcgattatcgtcaaattgaattacgtgtccttgcccatctttctggcgatgagaacctcatccgcgtgtttcaggaaggcaaagacattcacactcaaacggcaagctggatgtttggattatcagctgaagcgatcgatcctttgatgcgtcgtgcagcgaagaccatcaatttcggtgttctctacggtatgagtgcctttcgtttgtcgcaggaattaggcattccctatgaagaagctcaggcgttcattcagaaatactttcaaagctatcccaaagttaaagcatggatcgagaagactctccgtgaaggccgcacacgtggttacgtagagaccttatttggacgtcgccgctatgttcccgatttaaacgctcgcgtgaaaggcaagcgtgaagccgccgaacgcatggcgttcaacatgcctgtacagggcacggcagctgacctcatgaaacttgcaatggtgcgcctttttccacaattgcgtgaagttggtgcccgcatgctcttgcaggtccacgatgaactcttgttagaagcgccaaaagagcgtgcggaagaggtggcagccctcgcgaaagaagttatgtggggcgtgtggcccttagcggtgcctcttgaagtcgaagttggtattggcgaggattggctggctgccaaagga

SEQ ID NO: 6310 - protein, 841 aa, synthetic construct
  REGION 1..841: note = Variant of DNA polymerase I from Thermus sp. strain 2.9
MHHHHHHGGSGVLPVFEPKGRVLLVDGHHLAYRNFFALKGLTTSLGEPVQGVYGFAKSLLKALKEDGDVVIVVFDAKAPSFRHEAYEAYKAGRAPTPEDFPRQLALMKELVDLLGLERLEVPGFEADDVLATLAKKAEREGYEVQILTADRDLFQLLSPRISVLHPEGHRITPEWLWEKYGLRPEQWVDFRALAGDPSDNIPGVKGIGEKTALKLLKEWGSLENLLKNLDQVKPESVREKILAHLEDLKLSRELSRVRTDLPLEVDFGRRREPDWEGLKAFLERLEFGSLLHEFGLLESPLLAEEAPWPPPEGAFLGYRLSRPEPMWAELLALAASAQGRVYRAEDPHGALRGLFEVRGLLAKDLAVVALREGLDLPPTDDPMLLAYLLDPSNTTPEGVARRYGGEWTEDAAKRALLAERLHENLLGRLQGEERLLWLYEEVEKPLSRVLAHMEATGVKLDVAYLENLSLEVAAHMRRLEEEVFRLAGRSFRLNSRDQLERVLFDELGLPPIGKTEKTGKRSTSAAVLEALREVHPIVDKILQYREMAKLKGTYIDRLPALVHPKTGRLHTRFNQTATATGRLSSSDPNLQNIPVRTPLGQKIRRAFVAEEGWRLVALDYRQIELRVLAHLSGDENLIRVFQEGKDIHTQTASWMFGLSAEAIDPLMRRAAKTINFGVLYGMSAFRLSQELGIPYEEAQAFIQKYFQSYPKVKAWIEKTLREGRTRGYVETLFGRRRYVPDLNARVKGKREAAERMAFNMPVQGTAADLMKLAMVRLFPQLREVGARMLLQVHDELLLEAPKERAEEVAALAKEVMWGVWPLAVPLEVEVGIGEDWLAAKG

SEQ ID NO: 6311 - DNA, 2523 bp, synthetic construct
  misc_feature 1..2523: note = Variant of DNA polymerase I from Thermus sp. strain 2.9
  source 1..2523: mol_type = other DNA
atgcaccatcatcatcatcatggcggtagcggcgtgttaccggtgttcgagcctaaaggtcgcgtgcttctggttgatggccatcatctcgcgtatcgtaacttctttgccctgaaaggattaaccaccagcctgggcgagccggtacagggtgtctacggctttgcaaagtcgctcctgaaagctctgaaagaagacggtgatgtggtgattgttgtctttgatgcgaaagcgccaagttttcgccacgaagcgtacgaagcttacaaagccgggcgtgctccaacgccggaagactttcctcgccaattggcgcttatgaaggaattagtggatttgcttggcctcgaacgcttggaagttcccggtttcgaggcagacgacgtattagcgactctcgcaaagaaagccgaacgtgagggctatgaagtccagatcttgacagcagatcgcgatcttttccagcttttatctccgcgcatctcggtgttacacccggaagggcatcgtatcaccccggaatggctctgggagaaatatggtttgcgtcccgaacaatgggtggattttcgcgccttagcaggcgatccgagcgacaatattccgggagttaaaggtatcggcgagaagacggcgctcaagctccttaaagaatgggggtcgttggagaacttgcttaagaatttagatcaggtcaaaccagagtcagtgcgtgagaagattcttgctcacctcgaagacctcaaattaagccgcgaattgtcccgtgtacgcaccgatttgccgctcgaagttgatttcggtcgccgccgcgaacctgactgggagggtcttaaagcgtttttagagcgtcttgaatttggttcgctcttgcatgaattcggccttttagaaagcccgttactggccgaagaagcaccttggccaccgcccgagggcgcgtttttaggttaccgtttgagtcgcccggaaccgatgtgggccgaattactggctcttgcagcgtctgcccagggacgtgtgtatcgcgcggaagaccctcatggtgcgctccgcggcctcttcgaagtccgtggactccttgccaaagacttagctgttgttgcattgcgcgaaggtcttgatttacctccgactgatgatccaatgcttcttgcgtacctcttggacccgtcaaacacgacgcccgaaggcgtagcccgtcgttacggcggcgagtggaccgaagatgcagcgaaacgcgcgttattggccgaacgtttgcacgaaaatttattaggacgtttgcaaggcgaggaacgtctcctctggctttacgaagaagtggagaaaccattgagtcgcgtgctcgcgcatatggaagctaccggtgtcaaattagacgtggcgtatttggagaatctcagccttgaagttgctgcccacatgcgccgcttggaggaagaagtattccgtttagcaggccgttcctttcgccttaactctcgcgatcagttagaacgtgtgttgttcgatgaacttggtctccctcctatcggcaagacagagtggaccggtaaacgtagcacttcagcggcggttttagaagctcttcgcgaagtccatcccattgtggacaagatcttgcagtaccgcgaaatggcgaaattgaaaggcacctatattgaccgtcttccggcattagtccacccgaaaacgggacgcctccatacccgcttcaaccaaacagccacggcgaccggtcgtttgtcctcctctgatccaaaccttcagaatattccagtacgtaccccattgggccagaagatccgccgtgcgtttgtagctgaggagggttggcgtttagtggccctcgattatcgtcaaattgaattacgtgtccttgcccatctttctggcgatgagaacctcatccgcgtgtttcaggaaggcaaagacattcacactcaaacggcaagctggatgtttggattatcagctgaagcgatcgatcctttgatgcgtcgtgcagcgaagaccatcaatttcggtgttctctacggtatgagtgcctttcgtttgtcgcaggaattaggcattccctatgaagaagctcaggcgttcattcagaaatactttcaaagctatcccaaagttaaagcatggatcgagaagactctccgtgaaggccgcacacgtggttacgtagagaccttatttggacgtcgccgctatgttcccgatttaaacgctcgcgtgaaaggcaagcgtgaagccgccgaacgcatggcgttcaacatgcctgtacagggcacggcagctgacctcatgaaacttgcaatggtgcgcctttttccacaattgcgtgaagttggtgcccgcatgctcttgcaggtccacgatgaactcttgttagaagcgccaaaagagcgtgcggaagaggtggcagccctcgcgaaagaagttatggaaggcgtgtggcccttagcggtgcctcttgaagtcgaagttggtattggcgaggattggctggctgccaaagga

SEQ ID NO: 6312 - protein, 841 aa, synthetic construct
  REGION 1..841: note = Variant of DNA polymerase I from Thermus sp. strain 2.9
MHHHHHHGGSGVLPVFEPKGRVLLVDGHHLAYRNFFALKGLTTSLGEPVQGVYGFAKSLLKALKEDGDVVIVVFDAKAPSFRHEAYEAYKAGRAPTPEDFPRQLALMKELVDLLGLERLEVPGFEADDVLATLAKKAEREGYEVQILTADRDLFQLLSPRISVLHPEGHRITPEWLWEKYGLRPEQWVDFRALAGDPSDNIPGVKGIGEKTALKLLKEWGSLENLLKNLDQVKPESVREKILAHLEDLKLSRELSRVRTDLPLEVDFGRRREPDWEGLKAFLERLEFGSLLHEFGLLESPLLAEEAPWPPPEGAFLGYRLSRPEPMWAELLALAASAQGRVYRAEDPHGALRGLFEVRGLLAKDLAVVALREGLDLPPTDDPMLLAYLLDPSNTTPEGVARRYGGEWTEDAAKRALLAERLHENLLGRLQGEERLLWLYEEVEKPLSRVLAHMEATGVKLDVAYLENLSLEVAAHMRRLEEEVFRLAGRSFRLNSRDQLERVLFDELGLPPIGKTEWTGKRSTSAAVLEALREVHPIVDKILQYREMAKLKGTYIDRLPALVHPKTGRLHTRFNQTATATGRLSSSDPNLQNIPVRTPLGQKIRRAFVAEEGWRLVALDYRQIELRVLAHLSGDENLIRVFQEGKDIHTQTASWMFGLSAEAIDPLMRRAAKTINFGVLYGMSAFRLSQELGIPYEEAQAFIQKYFQSYPKVKAWIEKTLREGRTRGYVETLFGRRRYVPDLNARVKGKREAAERMAFNMPVQGTAADLMKLAMVRLFPQLREVGARMLLQVHDELLLEAPKERAEEVAALAKEVMEGVWPLAVPLEVEVGIGEDWLAAKG

SEQ ID NO: 6313 - DNA, 2523 bp, synthetic construct
  misc_feature 1..2523: note = Variant of DNA polymerase I from Thermus sp. strain 2.9
  source 1..2523: mol_type = other DNA
atgcaccatcatcatcatcatggcggtagcggcgtgttaccggtgttcgagcctaaaggtcgcgtgcttctggttgatggccatcatctcgcgtatcgtaacttctttgccctgaaaggattaaccaccagcctgggcgagccggtacagggtgtctacggctttgcaaagtcgctcctgaaagctctgaaagaagacggtgatgtggtgattgttgtctttgatgcgaaagcgccaagttttcgccacgaagcgtacgaagcttacaaagccgggcgtgctccaacgccggaagactttcctcgccaattggcgcttatgaaggaattagtggatttgcttggcctcgaacgcttggaagttcccggtttcgaggcagacgacgtattagcgactctcgcaaagaaagccgaacgtgagggctatgaagtccagatcttgacagcagatcgcgatcttttccagcttttatctccgcgcatctcggtgttacacccggaagggcatcgtatcaccccggaatggctctgggagaaatatggtttgcgtcccgaacaatgggtggattttcgcgccttagcaggcgatccgagcgacaatattccgggagttaaaggtatcggcgagaagacggcgctcaagctccttaaagaatgggggtcgttggagaacttgcttaagaatttagatcaggtcaaaccagagtcagtgcgtgagaagattcttgctcacctcgaagacctcaaattaagccgcgaattgtcccgtgtacgcaccgatttgccgctcgaagttgatttcggtcgccgccgcgaacctgactgggagggtcttaaagcgtttttagagcgtcttgaatttggttcgctcttgcatgaattcggccttttagaaagcccgttactggccgaagaagcaccttggccaccgcccgagggcgcgtttttaggttaccgtttgagtcgcccggaaccgatgtgggccgaattactggctcttgcagcgtctgcccagggacgtgtgtatcgcgcggaagaccctcatggtgcgctccgcggcctcttcgaagtccgtggactccttgccaaagacttagctgttgttgcattgcgcgaaggtcttgatttacctccgactgatgatccaatgcttcttgcgtacctcttggacccgtcaaacacgacgcccgaaggcgtagcccgtcgttacggcggcgagtggaccgaagatgcagcgaaacgcgcgttattggccgaacgtttgcacgaaaatttattaggacgtttgcaaggcgaggaacgtctcctctggctttacgaagaagtggagaaaccattgagtcgcgtgctcgcgcatatggaagctaccggtgtcaaattagacgtggcgtatttggagaatctcagccttgaagttgctgcccacatgcgccgcttggaggaagaagtattccgtttagcaggccgttcctttcgccttaactctcgcgatcagttagaacgtgtgttgttcgatgaacttggtctccctcctatcggcaagacagagaagaccggtaaacgtagcacttcagcggcggttttagaagctcttcgcgaagtccatcccattgtggacaagatcttgcagtaccgcgaaatggcgaaattgaaaggcacctatattgaccgtcttccggcattagtccacccgaaaacgggacgcctccatacccgcttcaaccaaacagccacggcgaccggtcgtttgtcctcctctgatccaaaccttcagaatattccagtacgtaccccattgggccagaagatccgccgtgcgtttgtagctgaggagggttggcgtttagtggccctcgattatcgtcaaattgaattacgtgtccttgcccatctttctggcgatgagaacctcatccgcgtgtttcaggaaggcaaagacattcacactcaaacggcaagctggatgtttggattatcagctgaagcgatcgatcctttgatgcgtcgtgcagcgaagaccatcaatttcggtgttctctacggtatgagtgcctttcgtttgtcgcaggaattaggcattccctatgaagaagctcaggcgttcattcagaaatactttcaaagctatcccaaagttaaagcatggatcgagaagactctccgtgaaggccgcacacgtggttacgtagagaccttatttggacgtcgccgctatgttcccgatttaaacgctcgcgtgaaaggcaagcgtgaagccgccgaacgcatggcgttcaacatgcctgtacagggcacggcagctgacctcatgaaacttgcaatggtgcgcctttttccacaattgcgtgaagttggtgcccgcatgctcttgcaggtccacgatgaactcttgttagaagcgccaaaagagcgtgcggaagaggtggcagccctcgcgaaagaagttatggaaggcgtgtggcttttagcggtgcctcttgaagtcgaagttggtattggcgaggattggctggctgccaaagga

SEQ ID NO: 6314 - protein, 841 aa, synthetic construct
  REGION 1..841: note = Variant of DNA polymerase I from Thermus sp. strain 2.9
MHHHHHHGGSGVLPVFEPKGRVLLVDGHHLAYRNFFALKGLTTSLGEPVQGVYGFAKSLLKALKEDGDVVIVVFDAKAPSFRHEAYEAYKAGRAPTPEDFPRQLALMKELVDLLGLERLEVPGFEADDVLATLAKKAEREGYEVQILTADRDLFQLLSPRISVLHPEGHRITPEWLWEKYGLRPEQWVDFRALAGDPSDNIPGVKGIGEKTALKLLKEWGSLENLLKNLDQVKPESVREKILAHLEDLKLSRELSRVRTDLPLEVDFGRRREPDWEGLKAFLERLEFGSLLHEFGLLESPLLAEEAPWPPPEGAFLGYRLSRPEPMWAELLALAASAQGRVYRAEDPHGALRGLFEVRGLLAKDLAVVALREGLDLPPTDDPMLLAYLLDPSNTTPEGVARRYGGEWTEDAAKRALLAERLHENLLGRLQGEERLLWLYEEVEKPLSRVLAHMEATGVKLDVAYLENLSLEVAAHMRRLEEEVFRLAGRSFRLNSRDQLERVLFDELGLPPIGKTEKTGKRSTSAAVLEALREVHPIVDKILQYREMAKLKGTYIDRLPALVHPKTGRLHTRFNQTATATGRLSSSDPNLQNIPVRTPLGQKIRRAFVAEEGWRLVALDYRQIELRVLAHLSGDENLIRVFQEGKDIHTQTASWMFGLSAEAIDPLMRRAAKTINFGVLYGMSAFRLSQELGIPYEEAQAFIQKYFQSYPKVKAWIEKTLREGRTRGYVETLFGRRRYVPDLNARVKGKREAAERMAFNMPVQGTAADLMKLAMVRLFPQLREVGARMLLQVHDELLLEAPKERAEEVAALAKEVMEGVWLLAVPLEVEVGIGEDWLAAKG

SEQ ID NO: 6315 - DNA, 2523 bp, synthetic construct
  misc_feature 1..2523: note = Variant of DNA polymerase I from Thermus sp. strain 2.9
  source 1..2523: mol_type = other DNA
atgcaccatcatcatcatcatggcggtagcggcgtgttaccggtgttcgagcctaaaggtcgcgtgcttctggttgatggccatcatctcgcgtatcgtaacttctttgccctgaaaggattaaccaccagcctgggcgagccggtacagggtgtctacggctttgcaaagtcgctcctgaaagctctgaaagaagacggtgatgtggtgattgttgtctttgatgcgaaagcgccaagttttcgccacgaagcgtacgaagcttacaaagccgggcgtgctccaacgccggaagactttcctcgccaattggcgcttatgaaggaattagtggatttgcttggcctcgaacgcttggaagttcccggtttcgaggcagacgacgtattagcgactctcgcaaagaaagccgaacgtgagggctatgaagtccagatcttgacagcagatcgcgatcttttccagcttttatctccgcgcatctcggtgttacacccggaagggcatcgtatcaccccggaatggctctgggagaaatatggtttgcgtcccgaacaatgggtggattttcgcgccttagcaggcgatccgagcgacaatattccgggagttaaaggtatcggcgagaagacggcgctcaagctccttaaagaatgggggtcgttggagaacttgcttaagaatttagatcaggtcaaaccagagtcagtgcgtgagaagattcttgctcacctcgaagacctcaaattaagccgcgaattgtcccgtgtacgcaccgatttgccgctcgaagttgatttcggtcgccgccgcgaacctgactgggagggtcttaaagcgtttttagagcgtcttgaatttggttcgctcttgcatgaattcggccttttagaaagcccgttactggccgaagaagcaccttggccaccgcccgagggcgcgtttttaggttaccgtttgagtcgcccggaaccgatgtgggccgaattactggctcttgcagcgtctgcccagggacgtgtgtatcgcgcggaagaccctcatggtgcgctccgcggcctcttcgaagtccgtggactccttgccaaacctttagctgttgttgcattgcgcgaaggtcttgatttacctccgactgatgatccaatgcttcttgcgtacctcttggacccgtcaaacacgacgcccgaaggcgtagcccgtcgttacggcggcgagtggaccgaagatgcagcgaaacgcgcgttattggccgaacgtttgcacgaaaatttattaggacgtttgcaaggcgaggaacgtctcctctggctttacgaagaagtggagaaaccattgagtcgcgtgctcgcgcatatggaagctaccggtgtcaaattagacgtggcgtatttggagaatctcagccttgaagttgctgcccacatgcgccgcttggaggaagaagtattccgtttagcaggccgttcctttcgccttaactctcgcgatcagttagaacgtgtgttgttcgatgaacttggtctccctcctatcggcaagacagagaagaccggtaaacgtagcacttcagcggcggttttagaagctcttcgcgaagtccatcccattgtggacaagatcttgcagtaccgcgaaatggcgaaattgaaaggcacctatattgaccgtcttccggcattagtccacccgaaaacgggacgcctccatacccgcttcaaccaaacagccacggcgaccggtcgtttgtcctcctctgatccaaaccttcagaatattccagtacgtaccccattgggccagaagatccgccgtgcgtttgtagctgaggagggttggcgtttagtggccctcgattatcgtcaaattgaattacgtgtccttgcccatctttctggcgatgagaacctcatccgcgtgtttcaggaaggcaaagacattcacactcaaacggcaagctggatgtttggattatcagctgaagcgatcgatcctttgatgcgtcgtgcagcgaagaccatcaatttcggtgttctctacggtatgagtgcctttcgtttgtcgcaggaattaggcattccctatgaagaagctcaggcgttcattcagaaatactttcaaagctatcccaaagttaaagcatggatcgagaagactctccgtgaaggccgcacacgtggttacgtagagaccttatttggacgtcgccgctatgttcccgatttaaacgctcgcgtgaaaggcaagcgtgaagccgccgaacgcatggcgttcaacatgcctgtacagggcacggcagctgacctcatgaaacttgcaatggtgcgcctttttccacaattgcgtgaagttggtgcccgcatgctcttgcaggtccacgatgaactcttgttagaagcgccaaaagagcgtgcggaagaggtggcagccctcgcgaaagaagttatggaaggcgtgtggcccttagcggtgcctcttgaagtcgaagttggtattggcgaggattggctggctgccaaagga

SEQ ID NO: 6316 - protein, 841 aa, synthetic construct
  REGION 1..841: note = Variant of DNA polymerase I from Thermus sp. strain 2.9
MHHHHHHGGSGVLPVFEPKGRVLLVDGHHLAYRNFFALKGLTTSLGEPVQGVYGFAKSLLKALKEDGDVVIVVFDAKAPSFRHEAYEAYKAGRAPTPEDFPRQLALMKELVDLLGLERLEVPGFEADDVLATLAKKAEREGYEVQILTADRDLFQLLSPRISVLHPEGHRITPEWLWEKYGLRPEQWVDFRALAGDPSDNIPGVKGIGEKTALKLLKEWGSLENLLKNLDQVKPESVREKILAHLEDLKLSRELSRVRTDLPLEVDFGRRREPDWEGLKAFLERLEFGSLLHEFGLLESPLLAEEAPWPPPEGAFLGYRLSRPEPMWAELLALAASAQGRVYRAEDPHGALRGLFEVRGLLAKPLAVVALREGLDLPPTDDPMLLAYLLDPSNTTPEGVARRYGGEWTEDAAKRALLAERLHENLLGRLQGEERLLWLYEEVEKPLSRVLAHMEATGVKLDVAYLENLSLEVAAHMRRLEEEVFRLAGRSFRLNSRDQLERVLFDELGLPPIGKTEKTGKRSTSAAVLEALREVHPIVDKILQYREMAKLKGTYIDRLPALVHPKTGRLHTRFNQTATATGRLSSSDPNLQNIPVRTPLGQKIRRAFVAEEGWRLVALDYRQIELRVLAHLSGDENLIRVFQEGKDIHTQTASWMFGLSAEAIDPLMRRAAKTINFGVLYGMSAFRLSQELGIPYEEAQAFIQKYFQSYPKVKAWIEKTLREGRTRGYVETLFGRRRYVPDLNARVKGKREAAERMAFNMPVQGTAADLMKLAMVRLFPQLREVGARMLLQVHDELLLEAPKERAEEVAALAKEVMEGVWPLAVPLEVEVGIGEDWLAAKG

SEQ ID NO: 6317 - DNA, 2523 bp, synthetic construct
  misc_feature 1..2523: note = Variant of DNA polymerase I from Thermus sp. strain 2.9
  source 1..2523: mol_type = other DNA
atgcaccatcatcatcatcatggcggtagcggcgtgttaccggtgttcgagcctaaaggtcgcgtgcttctggttgatggccatcatctcgcgtatcgtaacttctttgccctgaaaggattaaccaccagcctgggcgagccggtacagggtgtctacggctttgcaaagtcgctcctgaaagctctgaaagaagacggtgatgtggtgattgttgtctttgatgcgaaagcgccaagttttcgccacgaagcgtacgaagcttacaaagccgggcgtgctccaacgccggaagactttcctcgccaattggcgcttatgaaggaattagtggatttgcttggcctcgaacgcttggaagttcccggtttcgaggcagacgacgtattagcgactctcgcaaagaaagccgaacgtgagggctatgaagtccagatcttgacagcagatcgcgatcttttccagcttttatctccgcgcatctcggtgttacacccggaagggcatcgtatcaccccggaatggctctgggagaaatatggtttgcgtcccgaacaatgggtggattttcgcgccttagcaggcgatccgagcgacaatattccgggagttaaaggtatcggcgagaagacggcgctcaagctccttaaagaatgggggtcgttggagaacttgcttaagaatttagatcaggtcaaaccagagtcagtgcgtgagaagattcttgctcacctcgaagacctcaaattaagccgcgaattgtcccgtgtacgcaccgatttgccgctcgaagttgatttcggtcgccgccgcgaacctgactgggagggtcttaaagcgtttttagagcgtcttgaatttggttcgctcttgcatgaattcggccttttagaaagcccgttactggccgaagaagcaccttggccaccgcccgagggcgcgtttttaggttaccgtttgagtcgcccggaaccgatgtgggccgaattactggctcttgcagcgtctgcccagggacgtgtgtatcgcgcggaagaccctcatggtgcgctccgcggcctcttcgaagtccgtggactccttgccaaagacttagctgttgttgcattgcgcgaaggtcttgatttacctccgactgatgatccaatgcttcttcagtacctcttggacccgtcaaacacgacgcccgaaggcgtagcccgtcgttacggcggcgagtggaccgaagatgcagcgaaacgcgcgttattggccgaacgtttgcacgaaaatttattaggacgtttgcaaggcgaggaacgtctcctctggctttacgaagaagtggagaaaccattgagtcgcgtgctcgcgcatatggaagctaccggtgtcaaattagacgtggcgtatttggagaatctcagccttgaagttgctgcccacatgcgccgcttggaggaagaagtattccgtttagcaggccgttcctttcgccttaactctcgcgatcagttagaacgtgtgttgttcgatgaacttggtctccctcctatcggcaagacagagaagaccggtaaacgtagcacttcagcggcggttttagaagctcttcgcgaagtccatcccattgtggacaagatcttgcagtaccgcgaaatggcgaaattgaaaggcacctatattgaccgtcttccggcattagtccacccgaaaacgggacgcctccatacccgcttcaaccaaacagccacggcgaccggtcgtttgtcctcctctgatccaaaccttcagaatattccagtacgtaccccattgggccagaagatccgccgtgcgtttgtagctgaggagggttggcgtttagtggccctcgattatcgtcaaattgaattacgtgtccttgcccatctttctggcgatgagaacctcatccgcgtgtttcaggaaggcaaagacattcacactcaaacggcaagctggatgtttggattatcagctgaagcgatcgatcctttgatgcgtcgtgcagcgaagaccatcaatttcggtgttctctacggtatgagtgcctttcgtttgtcgcaggaattaggcattccctatgaagaagctcaggcgttcattcagaaatactttcaaagctatcccaaagttaaagcatggatcgagaagactctccgtgaaggccgcacacgtggttacgtagagaccttatttggacgtcgccgctatgttcccgatttaaacgctcgcgtgaaaggcaagcgtgaagccgccgaacgcatggcgttcaacatgcctgtacagggcacggcagctgacctcatgaaacttgcaatggtgcgcctttttccacaattgcgtgaagttggtgcccgcatgctcttgcaggtccacgatgaactcttgttagaagcgccaaaagagcgtgcggaagaggtggcagccctcgcgaaagaagttatggaaggcgtgtggcccttagcggtgcctcttgaagtcgaagttggtattggcgaggattggctggctgccaaagga

SEQ ID NO: 6318 - protein, 841 aa, synthetic construct
  REGION 1..841: note = Variant of DNA polymerase I from Thermus sp. strain 2.9
MHHHHHHGGSGVLPVFEPKGRVLLVDGHHLAYRNFFALKGLTTSLGEPVQGVYGFAKSLLKALKEDGDVVIVVFDAKAPSFRHEAYEAYKAGRAPTPEDFPRQLALMKELVDLLGLERLEVPGFEADDVLATLAKKAEREGYEVQILTADRDLFQLLSPRISVLHPEGHRITPEWLWEKYGLRPEQWVDFRALAGDPSDNIPGVKGIGEKTALKLLKEWGSLENLLKNLDQVKPESVREKILAHLEDLKLSRELSRVRTDLPLEVDFGRRREPDWEGLKAFLERLEFGSLLHEFGLLESPLLAEEAPWPPPEGAFLGYRLSRPEPMWAELLALAASAQGRVYRAEDPHGALRGLFEVRGLLAKDLAVVALREGLDLPPTDDPMLLQYLLDPSNTTPEGVARRYGGEWTEDAAKRALLAERLHENLLGRLQGEERLLWLYEEVEKPLSRVLAHMEATGVKLDVAYLENLSLEVAAHMRRLEEEVFRLAGRSFRLNSRDQLERVLFDELGLPPIGKTEKTGKRSTSAAVLEALREVHPIVDKILQYREMAKLKGTYIDRLPALVHPKTGRLHTRFNQTATATGRLSSSDPNLQNIPVRTPLGQKIRRAFVAEEGWRLVALDYRQIELRVLAHLSGDENLIRVFQEGKDIHTQTASWMFGLSAEAIDPLMRRAAKTINFGVLYGMSAFRLSQELGIPYEEAQAFIQKYFQSYPKVKAWIEKTLREGRTRGYVETLFGRRRYVPDLNARVKGKREAAERMAFNMPVQGTAADLMKLAMVRLFPQLREVGARMLLQVHDELLLEAPKERAEEVAALAKEVMEGVWPLAVPLEVEVGIGEDWLAAKG

SEQ ID NO: 6319 - DNA, 2523 bp, synthetic construct
  misc_feature 1..2523: note = Variant of DNA polymerase I from Thermus sp. strain 2.9
  source 1..2523: mol_type = other DNA
atgcaccatcatcatcatcatggcggtagcggcgtgttaccggtgttcgagcctaaaggtcgcgtgcttctggttgatggccatcatctcgcgtatcgtaacttctttgccctgaaaggattaaccaccagcctgggcgagccggtacagggtgtctacggctttgcaaagtcgctcctgaaagctctgaaagaagacggtgatgtggtgattgttgtctttgatgcgaaagcgccaagttttcgccacgaagcgtacgaagcttacaaagccgggcgtgctccaacgccggaagactttcctcgccaattggcgcttatgaaggaattagtggatttgcttggcctcgaacgcttggaagttcccggtttcgaggcagacgacgtattagcgactctcgcaaagaaagccgaacgtgagggctatgaagtccagatcttgacagcagatcgcgatcttttccagcttttatctccgcgcatctcggtgttacacccggaagggcatcgtatcaccccggaatggctctgggagaaatatggtttgcgtcccgaacaatgggtggattttcgcgccttagcaggcgatccgagcgacaatattccgggagttaaaggtatcggcgagaagacggcgctcaagctccttaaagaatgggggtcgttggagaacttgcttaagaatttagatcaggtcaaaccagagtcagtgcgtgagaagattcttgctcacctcgaagacctcaaattaagccgcgaattgtcccgtgtacgcaccgatttgccgctcgaagttgatttcggtcgccgccgcgaacctgactgggagggtcttaaagcgtttttagagcgtcttgaatttggttcgctcttgcatgaattcggccttttagaaagcccgttaccggccgaagaagcaccttggccaccgcccgagggcgcgtttttaggttaccgtttgagtcgcccggaaccgatgtgggccgaattactggctcttgcagcgtctgcccagggacgtgtgtatcgcgcggaagaccctcatggtgcgctccgcggcctcttcgaagtccgtggactccttgccaaagacttagctgttgttgcattgcgcgaaggtcttgatttacctccgactgatgatccaatgcttcttgcgtacctcttggacccgtcaaacacgacgcccgaaggcgtagcccgtcgttacggcggcgagtggaccgaagatgcagcgaaacgcgcgttattggccgaacgtttgcacgaaaatttattaggacgtttgcaaggcgaggaacgtctcctctggctttacgaagaagtggagaaaccattgagtcgcgtgctcgcgcatatggaagctaccggtgtcaaattagacgtggcgtatttggagaatctcagccttgaagttgctgcccacatgcgccgcttggaggaagaagtattccgtttagcaggccactcctttcgccttaactctcgcgatcagttagaacgtgtgttgttcgatgaacttggtctccctcctatcggcaagacagagaagaccggtaaacgtagcacttcagcggcggttttagaagctcttcgcgaagtccatcccattgtggacaagatcttgcagtaccgcgaaatggcgaaattgaaaggcacctatattgaccgtcttccggcattagtccacccgaaaacgggacgcctccatacccgcttcaaccaaacagccacggcgaccggtcgtttgtcctcctctgatccaaaccttcagaatattccagtacgtaccccattgggccagaagatccgccgtgcgtttgtagctgaggagggttggcgtttagtggccctcgattatcgtcaaattgaattacgtgtccttgcccatctttctggcgatgagaacctcatccgcgtgtttcaggaaggcaaagacattcacactcaaacggcaagctggatgtttggattatcagctgaagcgatcgatcctttgatgcgtcgtgcagcgaagaccatcaatttcggtgttctctacggtatgagtgcctttcgtttgtcgcaggaattaggcattccctatgaagaagctcaggcgttcattcagaaatactttcaaagctatcccaaagttaaagcatggatcgagaagactctccgcgaaggccgcacacgtggttacgtagagaccttatttggacgtcgccgctatgttcccgatttaaacgctcgcgtgaaaggcaagcgtgaagccgccgaacgcatggcgttcaacatgcctgtacagggcacggcagctgacctcatgaaacttgcaatggtgcgcctttttccacaattgcgtgaagttggtgcccgcatgctcttgcaggtccacgatgaactcttgttagaagcgccaaaagagcgtgcggaagaggtggcagccctcgcgaaagaagttatggaaggcgtgtggcccttagcggtgcctcttgaagtcgaagttggtattggcgaggattggctggctgccaaagga

SEQ ID NO: 6320 - protein, 841 aa, synthetic construct
  REGION 1..841: note = Variant of DNA polymerase I from Thermus sp. strain 2.9
MHHHHHHGGSGVLPVFEPKGRVLLVDGHHLAYRNFFALKGLTTSLGEPVQGVYGFAKSLLKALKEDGDVVIVVFDAKAPSFRHEAYEAYKAGRAPTPEDFPRQLALMKELVDLLGLERLEVPGFEADDVLATLAKKAEREGYEVQILTADRDLFQLLSPRISVLHPEGHRITPEWLWEKYGLRPEQWVDFRALAGDPSDNIPGVKGIGEKTALKLLKEWGSLENLLKNLDQVKPESVREKILAHLEDLKLSRELSRVRTDLPLEVDFGRRREPDWEGLKAFLERLEFGSLLHEFGLLESPLPAEEAPWPPPEGAFLGYRLSRPEPMWAELLALAASAQGRVYRAEDPHGALRGLFEVRGLLAKDLAVVALREGLDLPPTDDPMLLAYLLDPSNTTPEGVARRYGGEWTEDAAKRALLAERLHENLLGRLQGEERLLWLYEEVEKPLSRVLAHMEATGVKLDVAYLENLSLEVAAHMRRLEEEVFRLAGHSFRLNSRDQLERVLFDELGLPPIGKTEKTGKRSTSAAVLEALREVHPIVDKILQYREMAKLKGTYIDRLPALVHPKTGRLHTRFNQTATATGRLSSSDPNLQNIPVRTPLGQKIRRAFVAEEGWRLVALDYRQIELRVLAHLSGDENLIRVFQEGKDIHTQTASWMFGLSAEAIDPLMRRAAKTINFGVLYGMSAFRLSQELGIPYEEAQAFIQKYFQSYPKVKAWIEKTLREGRTRGYVETLFGRRRYVPDLNARVKGKREAAERMAFNMPVQGTAADLMKLAMVRLFPQLREVGARMLLQVHDELLLEAPKERAEEVAALAKEVMEGVWPLAVPLEVEVGIGEDWLAAKG

SEQ ID NO: 6321 - DNA, 2523 bp, synthetic construct
  misc_feature 1..2523: note = Variant of DNA polymerase I from Thermus sp. strain 2.9
  source 1..2523: mol_type = other DNA
atgcaccatcatcatcatcatggcggtagcggcgtgttaccggtgttcgagcctaaaggtcgcgtgcttctggttgatggccatcatctcgcgtatcgtaacttctttgccctgaaaggattaaccaccagcctgggcgagccggtacagggtgtctacggctttgcaaagtcgctcctgaaagctctgaaagaagacggtgatgtggtgattgttgtctttgatgcgaaagcgccaagttttcgccacgaagcgtacgaagcttacaaagccgggcgtgctccaacgccggaagactttcctcgccaattggcgcttatgaaggaattagtggatttgcttggcctcgaacgcttggaagttcccggtttcgaggcagacgacgtattagcgactctcgcaaagaaagccgaacgtgagggctatgaagtccagatcttgacagcagatcgcgatcttttccagcttttatctccgcgcatctcggtgttacacccggaagggcatcgtatcaccccggaatggctctgggagaaatatggtttgcgtcccgaacaatgggtggattttcgcgccttagcaggcgatccgagcgacaatattccgggagttaaaggtatcggcgagaagacggcgctcaagctccttaaagaatgggggtcgttggagaacttgcttaagaatttagatcaggtcaaaccagagtcagtgcgtgagaagattcttgctcacctcgaagacctcaaattaagccgcgaattgtcccgtgtacgcaccgatttgccgctcgaagttgatttcggtcgccgccgcgaacctgactgggagggtcttaaagcgtttttagagcgtcttgaatttggttcgctcttgcatgaattcggccttttagaaagcccgttactggccgaagaagcaccttggccaccgcccgagggcgcgtttttaggttaccgtttgagtcgcccggaaccgatgtgggccgaattactggctcttgcagcgtctgcccagggacgtgtgtatcgcgcggaagaccctcatggtgcgctccgcggcctcttcgaagtccgtggactccttgccaaagacttagctgttgttgcattgcgcgaaggtcttgatttacctccgactgatgatccaatgcttcttgcgtacctcttggacccgtcaaacacgacgcccgaaggcgtagcccgtcgttacggcggcgagtggaccgaagatgcagcgaaacgcgcgttattggccgaacgtttgcacgaaaatttattaggacgtttgcaaggcgaggaacgtctcctctggctttacgaagaagtggagaaaccattgagtcgcgtgctcgcgcatatggaagctaccggtgtcaaattagacgtggcgtatttggagaatctcagccttgaagttgctgcccacatgcgccgcttggaggaagaagtattccgtttagcaggccgttcctttcgccttaactctcgcgatcagttagaacgtgtgttgttcgatgaacttggtctccctcctatcggcaagacagagaagaccggtaaacgtagcacttcagcggcggttttagaagctcttcgcgaagtccatcccattgtggacaagatcttgcagtaccgcgaaatggcgaaattgaaaggcacctatattgaccgtcttccggcattagtccacccgaaaacgggacgcctccatacccgcttcaaccaaacagccacggcgaccggtcgtttgtcctcctctgatccaaaccttcagaatattccagtacgtaccccattgggccagaagatccgccgtgcgtttgtagctgaggagggttggcgtttagtggccctcgattatcgtcaaattgaattacgtgtccttgcccatctttctggcgatgagaacctcatccgcgtgtttcaggaaggcaaagacattcacactcaaacggcaagctggatgtttggattatcagctgaagcgatcgatcctttgatgcgtcgtgcagcgaagaccatcaatttcggtgttctctacggtatgagtgcctttcgtttgtcgcaggaattaggcattccctatgaagaagctcaggcgttcattcagaaatactttcaaagctatcccaaagttaaagcatggatcgagaagactctccgtgaaggccgctgtcgtggttacgtagagaccttatttggacgtcgccgctatgttcccgatttaaacgctcgcgtgaaaggcaagcgtgaagccgccgaacgcatggcgttcaacatgcctgtacagggcacggcagctgacctcatgaaacttgcaatggtgcgcctttttccacaattgcgtgaagttggtgcccgcatgctcttgcaggtccacgatgaactcttgttagaagcgccaaaagagcgtgcggaagaggtggcagccctcgcgaaagaagttatggaaggcgtgtggcccttagcggtgcctcttgaagtcgaagttggtattggcgaggattggctggctgccaaagga

SEQ ID NO: 6322 - protein, 841 aa, synthetic construct
  REGION 1..841: note = Variant of DNA polymerase I from Thermus sp. strain 2.9
MHHHHHHGGSGVLPVFEPKGRVLLVDGHHLAYRNFFALKGLTTSLGEPVQGVYGFAKSLLKALKEDGDVVIVVFDAKAPSFRHEAYEAYKAGRAPTPEDFPRQLALMKELVDLLGLERLEVPGFEADDVLATLAKKAEREGYEVQILTADRDLFQLLSPRISVLHPEGHRITPEWLWEKYGLRPEQWVDFRALAGDPSDNIPGVKGIGEKTALKLLKEWGSLENLLKNLDQVKPESVREKILAHLEDLKLSRELSRVRTDLPLEVDFGRRREPDWEGLKAFLERLEFGSLLHEFGLLESPLLAEEAPWPPPEGAFLGYRLSRPEPMWAELLALAASAQGRVYRAEDPHGALRGLFEVRGLLAKDLAVVALREGLDLPPTDDPMLLAYLLDPSNTTPEGVARRYGGEWTEDAAKRALLAERLHENLLGRLQGEERLLWLYEEVEKPLSRVLAHMEATGVKLDVAYLENLSLEVAAHMRRLEEEVFRLAGRSFRLNSRDQLERVLFDELGLPPIGKTEKTGKRSTSAAVLEALREVHPIVDKILQYREMAKLKGTYIDRLPALVHPKTGRLHTRFNQTATATGRLSSSDPNLQNIPVRTPLGQKIRRAFVAEEGWRLVALDYRQIELRVLAHLSGDENLIRVFQEGKDIHTQTASWMFGLSAEAIDPLMRRAAKTINFGVLYGMSAFRLSQELGIPYEEAQAFIQKYFQSYPKVKAWIEKTLREGRCRGYVETLFGRRRYVPDLNARVKGKREAAERMAFNMPVQGTAADLMKLAMVRLFPQLREVGARMLLQVHDELLLEAPKERAEEVAALAKEVMEGVWPLAVPLEVEVGIGEDWLAAKG

SEQ ID NO: 6323 - DNA, 2523 bp, synthetic construct
  misc_feature 1..2523: note = Variant of DNA polymerase I from Thermus sp. strain 2.9
  source 1..2523: mol_type = other DNA
atgcaccatcatcatcatcatggcggtagcggcgtgttaccggtgttcgagcctaaaggtcgcgtgcttctggttgatggccatcatctcgcgtatcgtaacttctttgccctgaaaggattaaccaccagcctgggcgagccggtacagggtgtctacggctttgcaaagtcgctcctgaaagctctgaaagaagacggtgatgtggtgattgttgtctttgatgcgaaagcgccaagttttcgccacgaagcgtacgaagcttacaaagccgggcgtgctccaacgccggaagactttcctcgccaattggcgcttatgaaggaattagtggatttgcttggcctcgaacgcttggaagttcccggtttcgaggcagacgacgtattagcgactctcgcaaagaaagccgaacgtgagggctatgaagtccagatcttgacagcagatcgcgatcttttccagcttttatctccgcgcatctcggtgttacacccggaagggcatcgtatcaccccggaatggctctgggagaaatatggtttgcgtcccgaacaatgggtggattttcgcgccttagcaggcgatccgagcgacaatattccgggagttaaaggtatcggcgagaagacggcgctcaagctccttaaagaatgggggtcgttggagaacttgcttaagaatttagatcaggtcaaaccagagtcagtgcgtgagaagattcttgctcacctcgaagacctcaaattaagccgcgaattgtcccgtgtacgcaccgatttgccgctcgaagttgatttcggtcgccgccgcgaacctgactgggagggtcttaaagcgtttttagagcgtcttgaatttggttcgctcttgcatgaattcggccttttagaaagcccgttactggccgaagaagcaccttggccaccgcccgagggcgcgtttttaggttaccgtttgagtgggccggaaccgatgtgggccgaattactggctcttgcagcgtctgcccagggacgtgtgtatcgcgcggaagaccctcatggtgcgctccgcggcctcttcgaagtccgtggactccttgccaaagacttagctgttgttgcattgcgcgaaggtcttgatttacctccgactgatgatccaatgcttcttgcgtacctcttggacccgtcaaacacgacgcccgaaggcgtagcccgtcgttacggcggcgagtggaccgaagatgcagcgaaacgcgcgttattggccgaacgtttgcacgaaaatttattaggacgtttgcaaggcgaggaacgtctcctctggctttacgaagaagtggagaaaccattgagtcgcgtgctcgcgcatatggaagctaccggtgtcaaattagacgtggcgtatttggagaatctcagccttgaagttgctgcccacatgcgccgcttggaggaagaagtattccgtttagcaggccgttcctttcgccttaactctcgcgatcagttagaacgtgtgttgttcgatgaacttggtctccctcctatcggcaagacagagaagaccggtaaacgtagcacttcagcggcggttttagaagctcttcgcgaagtccatcccattgtggacaagatcttgcagtaccgcgaaatggcgaaattgaaaggcacctatattgaccgtcttccggcattagtccacccgaaaacgggacgcctccatacccgcttcaaccaaacagccacggcgaccggtcgtttgtcctcctctgatccaaaccttcagaatattccagtacgtaccccattgggccagaagatccgccgtgcgtttgtagctgaggagggttggcgtttagtggccctcgattatcgtcaaattgaattacgtgtccttgcccatctttctggcgatgagaacctcatccgcgtgtttcaggaaggcaaagacattcacactcaaacggcaagctggatgtttggattatcagctgaagcgatcgatcctttgatgcgtcgtgcagcgaagaccatcaatttcggtgttctctacggtatgagtgcctttcgtttgtcgcaggaattaggcattccctatgaagaagctcaggcgttcattcagaaatactttcaaagctatcccaaagttaaagcatggatcgagaagactctccgtgaaggccgcacacgtggttacgtagagaccttatttggacgtcgccgctatgttcccgatttaaacgctcgcgtgaaaggcaagcgtgaagccgccgaacgcatggcgttcaacatgcctgtacagggcacggcagctgacctcatgaaacttgcaatggtgcgcctttttccacaattgcgtgaagttggtgcccgcatgctcttgcaggtccacgatgaactcttgttagaagcgccaaaagagcgtgcggaagaggtggcagccctcgcgaaagaagttatggaaggcgtgtggcccttagcggtgcctcttgaagtcgaagttggtattggcgaggattggctggctgccaaagga

SEQ ID NO: 6324 - protein, 841 aa, synthetic construct
  REGION 1..841: note = Variant of DNA polymerase I from Thermus sp. strain 2.9
MHHHHHHGGSGVLPVFEPKGRVLLVDGHHLAYRNFFALKGLTTSLGEPVQGVYGFAKSLLKALKEDGDVVIVVFDAKAPSFRHEAYEAYKAGRAPTPEDFPRQLALMKELVDLLGLERLEVPGFEADDVLATLAKKAEREGYEVQILTADRDLFQLLSPRISVLHPEGHRITPEWLWEKYGLRPEQWVDFRALAGDPSDNIPGVKGIGEKTALKLLKEWGSLENLLKNLDQVKPESVREKILAHLEDLKLSRELSRVRTDLPLEVDFGRRREPDWEGLKAFLERLEFGSLLHEFGLLESPLLAEEAPWPPPEGAFLGYRLSGPEPMWAELLALAASAQGRVYRAEDPHGALRGLFEVRGLLAKDLAVVALREGLDLPPTDDPMLLAYLLDPSNTTPEGVARRYGGEWTEDAAKRALLAERLHENLLGRLQGEERLLWLYEEVEKPLSRVLAHMEATGVKLDVAYLENLSLEVAAHMRRLEEEVFRLAGRSFRLNSRDQLERVLFDELGLPPIGKTEKTGKRSTSAAVLEALREVHPIVDKILQYREMAKLKGTYIDRLPALVHPKTGRLHTRFNQTATATGRLSSSDPNLQNIPVRTPLGQKIRRAFVAEEGWRLVALDYRQIELRVLAHLSGDENLIRVFQEGKDIHTQTASWMFGLSAEAIDPLMRRAAKTINFGVLYGMSAFRLSQELGIPYEEAQAFIQKYFQSYPKVKAWIEKTLREGRTRGYVETLFGRRRYVPDLNARVKGKREAAERMAFNMPVQGTAADLMKLAMVRLFPQLREVGARMLLQVHDELLLEAPKERAEEVAALAKEVMEGVWPLAVPLEVEVGIGEDWLAAKG

SEQ ID NO: 6325 - DNA, 2523 bp, synthetic construct
  misc_feature 1..2523: note = Variant of DNA polymerase I from Thermus sp. strain 2.9
  source 1..2523: mol_type = other DNA
atgcaccatcatcatcatcatggcggtagcggcgtgttaccggtgttcgagcctaaaggtcgcgtgcttctggttgatggccatcatctcgcgtatcgtaacttctttgccctgaaaggattaaccaccagcctgggcgagccggtacagggtgtctacggctttgcaaagtcgctcctgaaagctctgaaagaagacggtgatgtggtgattgttgtctttgatgcgaaagcgccaagttttcgccacgaagcgtacgaagcttacaaagccgggcgtgctccaacgccggaagactttcctcgccaattggcgcttatgaaggaattagtggatttgcttggcctcgaacgcttggaagttcccggtttcgaggcagacgacgtattagcgactctcgcaaagaaagccgaacgtgagggctatgaagtccagatcttgacagcagatcgcgatcttttccagcttttatctccgcgcatctcggtgttacacccggaagggcatcgtatcaccccggaatggctctgggagaaatatggtttgcgtcccgaacaatgggtggattttcgcgccttagcaggcgatccgagcgacaatattccgggagttaaaggtatcggcgagaagacggcgctcaagctccttaaagaatgggggtcgttggagaacttgcttaagaatttagatcaggtcaaaccagagtcagtgcgtgagaagattcttgctcacctcgaagacctcaaattaagccgcgaattgtcccgtgtacgcaccgatttgccgctcgaagttgatttcggtcgccgccgcgaacctgactgggagggtcttaaagcgtttttagagcgtcttgaatttggttcgctcttgcatgaattcggccttttagaaagcccgttactggccgaagaagcaccttggccaccgcccgagggcgcgtttttaggttaccgtttgagtcgcccggaaccgatgtgggccgaattactggctcttgcagcgtctgcccagggacgtgtgtatcgcgcggaagaccctcatggtgcgctccgcggcctcttcgaagtccgtggactccttgccaaagacttagctgttgttgcattgcgcgaaggtcttgatttacctccgactgatgatccaatgcttcttgcgtacctcttggacccgtcaaacacgacgcccgaaggcgtagcccgtcgttacggcggcgagtggaccgaagatgcagcgaaacgcgcgttattggccgaacgtttgcacgaaaatttattaggacgtttgcaaggcgaggaacgtctcctctggctttacgaagaagtggagaaaccattgagtcgcgtgctcgcgcatatggaagctaccggtgtcaaattagacgtggcgtatttggagaatctcagccttgaagttgctgcccacatgcgccgcttggaggaagaagtattccgtttagcaggccgttcctttcgccttaactctcgcgatcagttagaacgtgtgttgttcgatgaacttggtctccctcctatcggcaagacagagaagaccggtaaacgtagcacttcagcggcggttttagaagctcttcgcgaagtccatcccattgtgcttaagatcttgcagtaccgcgaaatggcgaaattgaaaggcacctatattgaccgtcttccggcattagtccacccgaaaacgggacgcctccatacccgcttcaaccaaacagccacggcgaccggtcgtttgtcctcctctgatccaaaccttcagaatattccagtacgtaccccattgggccagaagatccgccgtgcgtttgtagctgaggagggttggcgtttagtggccctcgattatcgtcaaattgaattacgtgtccttgcccatctttctggcgatgagaacctcatccgcgtgtttcaggaaggcaaagacattcacactcaaacggcaagctggatgtttggattatcagctgaagcgatcgatcctttgatgcgtcgtgcagcgaagaccatcaatttcggtgttctctacggtatgagtgcctttcgtttgtcgcaggaattaggcattccctatgaagaagctcaggcgttcattcagaaatactttcaaagctatcccaaagttaaagcatggatcgagaagactctccgtgaaggccgcacacgtggttacgtagagaccttatttggacgtcgccgctatgttcccgatttaaacgctcgcgtgaaaggcaagcgtgaagccgccgaacgcatggcgttcaacatgcctgtacagggcacggcagctgacctcatgaaacttgcaatggtgcgcctttttccacaattgcgtgaagttggtgcccgcatgctcttgcaggtccacgatgaactcttgttagaagcgccaaaagagcgtgcggaagaggtggcagccctcgcgaaagaagttatggaaggcgtgtggcccttagcggtgcctcttgaagtcgaagttggtattggcgaggattggctggctgccaaagga

SEQ ID NO: 6326 - protein, 841 aa, synthetic construct
  REGION 1..841: note = Variant of DNA polymerase I from Thermus sp. strain 2.9
MHHHHHHGGSGVLPVFEPKGRVLLVDGHHLAYRNFFALKGLTTSLGEPVQGVYGFAKSLLKALKEDGDVVIVVFDAKAPSFRHEAYEAYKAGRAPTPEDFPRQLALMKELVDLLGLERLEVPGFEADDVLATLAKKAEREGYEVQILTADRDLFQLLSPRISVLHPEGHRITPEWLWEKYGLRPEQWVDFRALAGDPSDNIPGVKGIGEKTALKLLKEWGSLENLLKNLDQVKPESVREKILAHLEDLKLSRELSRVRTDLPLEVDFGRRREPDWEGLKAFLERLEFGSLLHEFGLLESPLLAEEAPWPPPEGAFLGYRLSRPEPMWAELLALAASAQGRVYRAEDPHGALRGLFEVRGLLAKDLAVVALREGLDLPPTDDPMLLAYLLDPSNTTPEGVARRYGGEWTEDAAKRALLAERLHENLLGRLQGEERLLWLYEEVEKPLSRVLAHMEATGVKLDVAYLENLSLEVAAHMRRLEEEVFRLAGRSFRLNSRDQLERVLFDELGLPPIGKTEKTGKRSTSAAVLEALREVHPIVLKILQYREMAKLKGTYIDRLPALVHPKTGRLHTRFNQTATATGRLSSSDPNLQNIPVRTPLGQKIRRAFVAEEGWRLVALDYRQIELRVLAHLSGDENLIRVFQEGKDIHTQTASWMFGLSAEAIDPLMRRAAKTINFGVLYGMSAFRLSQELGIPYEEAQAFIQKYFQSYPKVKAWIEKTLREGRTRGYVETLFGRRRYVPDLNARVKGKREAAERMAFNMPVQGTAADLMKLAMVRLFPQLREVGARMLLQVHDELLLEAPKERAEEVAALAKEVMEGVWPLAVPLEVEVGIGEDWLAAKG

SEQ ID NO: 6327 - DNA, 2523 bp, synthetic construct
  misc_feature 1..2523: note = Variant of DNA polymerase I from Thermus sp. strain 2.9
  source 1..2523: mol_type = other DNA
atgcaccatcatcatcatcatggcggtagcggcgtgttaccggtgttcgagcctaaaggtcgcgtgcttctggttgatggccatcatctcgcgtatcgtaacttctttgccctgaaaggattaaccaccagccgcggcgagccggtacagggtgtctacggctttgcaaagtcgctcctgaaagctctgaaagaagacggtgatgtggtgattgttgtctttgatgcgaaagcgccaagttttcgccacgaagcgtacgaagcttacaaagccgggcgtgctccaacgccggaagactttcctcgccaattggcgcttatgaaggaattagtggatttgcttggcctcgaacgcttggaagttcccggtttcgaggcagacgacgtattagcgactctcgcaaagaaagccgaacgtgagggctatgaagtccagatcttgacagcagatcgcgatcttttccagcttttatctccgcgcatctcggtgttacacccggaagggcatcgtatcaccccggaatggctctgggagaaatatggtttgcgtcccgaacaatgggtggattttcgcgccttagcaggcgatccgagcgacaatattccgggagttaaaggtatcggcgagaagacggcgctcaagctccttaaagaatgggggtcgttggagaacttgcttaagaatttagatcaggtcaaaccagagtcagtgcgtgagaagattcttgctcacctcgaagacctcaaattaagccgcgaattgtcccgtgtacgcaccgatttgccgctcgaagttgatttcggtcgccgccgcgaacctgactgggagggtcttaaagcgtttttagagcgtcttgaatttggttcgctcttgcatgaattcggccttttagaaagcccgttactggccgaagaagcaccttggccaccgcccgagggcgcgtttttaggttaccgtttgagtcgcccggaaccgatgtgggccgaattactggctcttgcagcgtctgcccagggacgtgtgtatcgcgcggaagaccctcatggtgcgctccgcggcctcttcgaagtccgtggactccttgccaaagacttagctgttgttgcattgcgcgaaggtcttgatttacctccgactgatgatccaatgcttcttgcgtacctcttggacccgtcaaacacgacgcccgaaggcgtagcccgtcgttacggcggcgagtggaccgaagatgcagcgaaacgcgcgttattggccgaacgtttgcacgaaaatttattaggacgtttgcaaggcgaggaacgtctcctctggctttacgaagaagtggagaaaccattgagtcgcgtgctcgcgcatatggaagctaccggtgtcaaattagacgtggcgtatttggaggcccttagccttgaagttgctgcccacatgcgccgcttggaggaagaagtattccgtttagcaggccgttcctttcgccttaactctcgcgatcagttagaacgtgtgttgttcgatgaacttggtctccctcctatcggcaagacagagaagaccggtaaacgtagcacttcagcggcggttttagaagctcttcgcgaagtccatcccattgtggacaagatcttgcagtaccgcgaaatggcgaaattgaaaggcacctatattgaccgtcttccggcattagtccacccgaaaacgggacgcctccatacccgcttcaaccaaacagccacggcgaccggtcgtttgtccagttctgatccaaaccttcagaatattccagtacgtaccccattgggccagaagatccgccgtgcgtttgtagctgaggagggttggcgtttagtggccctcgattatagtcaaattgaattacgtgtccttgcccatctttctggcgatgagaacctcatccgcgtgtttcaggaaggcaaagacattcacactcaaacggcaagctggatgtttggattatcagctgaagcgatcgatcctttgatgcgtcgtgcagcgaagaccatcaatttcggtgttctctacggtatgagtgcctttcgtttgtcgcaggaattaggcattccctatgaagaagctcaggcgttcattcagaaatactttcaaagctatcccaaagttaaagcatggatcgagaagactctccgtgaaggccgcacacgtggttacgtagagaccttatttggacgtcgccgctatgttcccgatttaaacgctcgcgtgaaaggcaagcgtgaagccgccgaacgcatggcgttcaacatgcctgtacagggcacggcagctgacctcatgaaacttgcaatggtgcgcctttttccacaattgcgtgaagttggtgcccgcatgctcttgcaggtccacgatgaactcttgttagaagcgccaaaagagcgtgcggaagaggtggcagccctcgcgaaagaagttatggaaggcgtgtggcccttagcggtgcctcttgaagtcgaagttggtattggcgaggattggctggctgccaaagga

SEQ ID NO: 6328 - protein, 841 aa, synthetic construct
  REGION 1..841: note = Variant of DNA polymerase I from Thermus sp. strain 2.9
MHHHHHHGGSGVLPVFEPKGRVLLVDGHHLAYRNFFALKGLTTSRGEPVQGVYGFAKSLLKALKEDGDVVIVVFDAKAPSFRHEAYEAYKAGRAPTPEDFPRQLALMKELVDLLGLERLEVPGFEADDVLATLAKKAEREGYEVQILTADRDLFQLLSPRISVLHPEGHRITPEWLWEKYGLRPEQWVDFRALAGDPSDNIPGVKGIGEKTALKLLKEWGSLENLLKNLDQVKPESVREKILAHLEDLKLSRELSRVRTDLPLEVDFGRRREPDWEGLKAFLERLEFGSLLHEFGLLESPLLAEEAPWPPPEGAFLGYRLSRPEPMWAELLALAASAQGRVYRAEDPHGALRGLFEVRGLLAKDLAVVALREGLDLPPTDDPMLLAYLLDPSNTTPEGVARRYGGEWTEDAAKRALLAERLHENLLGRLQGEERLLWLYEEVEKPLSRVLAHMEATGVKLDVAYLEALSLEVAAHMRRLEEEVFRLAGRSFRLNSRDQLERVLFDELGLPPIGKTEKTGKRSTSAAVLEALREVHPIVDKILQYREMAKLKGTYIDRLPALVHPKTGRLHTRFNQTATATGRLSSSDPNLQNIPVRTPLGQKIRRAFVAEEGWRLVALDYSQIELRVLAHLSGDENLIRVFQEGKDIHTQTASWMFGLSAEAIDPLMRRAAKTINFGVLYGMSAFRLSQELGIPYEEAQAFIQKYFQSYPKVKAWIEKTLREGRTRGYVETLFGRRRYVPDLNARVKGKREAAERMAFNMPVQGTAADLMKLAMVRLFPQLREVGARMLLQVHDELLLEAPKERAEEVAALAKEVMEGVWPLAVPLEVEVGIGEDWLAAKG

SEQ ID NO: 6329 - DNA, 2523 bp, synthetic construct
  misc_feature 1..2523: note = Variant of DNA polymerase I from Thermus sp. strain 2.9
  source 1..2523: mol_type = other DNA
atgcaccatcatcatcatcatggcggtagcggcgtgttaccggtgttcgagcctaaaggtcgcgtgcttctggttgatggccatcatctcgcgtatcgtaacttctttgccctgaaaggattaaccaccagcctgggcgagccggtacagggtgtctacggctttgcaaagtcgctcctgaaagctctgaaagaagacggtgatgtggtgattgttgtctttgatgcgaaagcgccaagttttcgccacgaagcgtacgaagcttacaaagccgggcgtgctccaacgccggaagactttcctcgccaattggcgcttatgaaggaattagtggatttgcttggcctcgaacgcttggaagttcccggtttcgaggcagacgacgtattagcgactctcgcaaagaaagccgaacgtgagggctatgaagtccagatcttgacagcagatcgcgatcttttccagcttttatctccgcgcatctcggtgttacacccggaagggcatcgtatcaccccggaatggctctgggagaaatatggtttgcgtcccgaacaatgggtggattttcgcgccttagcaggcgatccgagcgacaatattccgggagttaaaggtatcggcgagaagacggcgctcaagctccttaaagaatgggggtcgttggagaacttgcttaagaatttagatcaggtcaaaccagagtcagtgcgtgagaagattcttgctcacctcgaagacctcaaattaagccgcgaattgtcccgtgtacgcaccgatttgccgctcgaagttgatttcggccgccgccgcgaacctgactgggagggtcttaaagcgtttttagagcgtcttgaatttggttcgctcttgcatgaattcggccttttagaaagcccgttactggccgaagaagcaccttggccaccgcccgagggcgcgtttttaggttaccgtttgagtcgcccggaaccgatgtgggccgaattactggctcttgcagcgtctgcccagggacgtgtgtatcgcgcggaagaccctcatggtgcgctccgcggcctcttcgaagtccgtggactccttgccaaagacttagctgttgttgcattgcgcgaaggtcttgatttacctccgactgatgatccaatgcttcttgcgtacctcttggacccgtcaaacacgacgcccgaaggcgtagcccgtcgttacggcggcgagtggaccgaagatgcagcgaaacgcgcgttattggccgaacgtttgcacgcaaatttattaggacgtttgcaaggcgaggaacgtctcctctggctttacgaagaagtggagaaaccattgagtcgcgtgctcgcgcatatggaagctaccggtgtcaaattagacgtggcgtatttggaggcccttagccttgaagttgctgcccacatgcgccgcttggaggaagaagtattccgtttagcaggccactcctttcgccttaactctcgcgatcagttagaacgtgtgttgttcgatgaacttggtctccctcctatcggcaagacagagaagaccggtaaacgtagcacttcagcggcggttttagaagctcttcgcgaagtccatcccattgtggacaagatcttgcagtaccgcgaaatggcgaaattgaaaggcacctatattgaccgtcttccggcattagtccacccgaaaacgggacgcctccatacccgcttcaaccaaacagccacggcgaccggtcgtttgtcctcctctgatccaaaccttcagaatattccagtacgtaccccattgggccagaagatccgccgtgcgtttgtagctgaggagggttggcgtttagtggccctcgattatagtcaaattgaattacgtgtccttgcccatctttctggcgatgagaacctcatccgcgtgtttcaggaaggcaaagacattcacactcaaacggcaagctggatgtttggattatcagctgaagcgatcgatcctttgatgcgtcgtgcagcgaagaccatcaatttcggtgttctctacggtatgagtgcctttcgtttgtcgcaggaattaggcattccctatgaagaagctcaggcgttcattcagaaatactttcaaagctatcccaaagttaaagcatggatcgagaagactctcgaggaaggccgcacacgtggttacgtagagaccttatttggacgtcgccgctatgttcccgatttaaacgctcgcgtgaaaggcaaacgtgaagccgccgaacgcatggcgttcaacatgcctgtacagggcacggcagctgacctcatgaaacttgcaatggtgcgcctttttccacaattgcgtgaagttggtgcccgcatgctcttgcaggtccacgatgaactcttgttagaagcgccaaaagagcgtgcggaagaggtggcagccctcgcgaaagaagttatggaaggcgtgtggcccttagcggtgcctcttgaagtcgaagttggtattggcgaggattggctggctgccaaagga

SEQ ID NO: 6330 - protein, 841 aa, synthetic construct
  REGION 1..841: note = Variant of DNA polymerase I from Thermus sp. strain 2.9
MHHHHHHGGSGVLPVFEPKGRVLLVDGHHLAYRNFFALKGLTTSLGEPVQGVYGFAKSLLKALKEDGDVVIVVFDAKAPSFRHEAYEAYKAGRAPTPEDFPRQLALMKELVDLLGLERLEVPGFEADDVLATLAKKAEREGYEVQILTADRDLFQLLSPRISVLHPEGHRITPEWLWEKYGLRPEQWVDFRALAGDPSDNIPGVKGIGEKTALKLLKEWGSLENLLKNLDQVKPESVREKILAHLEDLKLSRELSRVRTDLPLEVDFGRRREPDWEGLKAFLERLEFGSLLHEFGLLESPLLAEEAPWPPPEGAFLGYRLSRPEPMWAELLALAASAQGRVYRAEDPHGALRGLFEVRGLLAKDLAVVALREGLDLPPTDDPMLLAYLLDPSNTTPEGVARRYGGEWTEDAAKRALLAERLHANLLGRLQGEERLLWLYEEVEKPLSRVLAHMEATGVKLDVAYLEALSLEVAAHMRRLEEEVFRLAGHSFRLNSRDQLERVLFDELGLPPIGKTEKTGKRSTSAAVLEALREVHPIVDKILQYREMAKLKGTYIDRLPALVHPKTGRLHTRFNQTATATGRLSSSDPNLQNIPVRTPLGQKIRRAFVAEEGWRLVALDYSQIELRVLAHLSGDENLIRVFQEGKDIHTQTASWMFGLSAEAIDPLMRRAAKTINFGVLYGMSAFRLSQELGIPYEEAQAFIQKYFQSYPKVKAWIEKTLEEGRTRGYVETLFGRRRYVPDLNARVKGKREAAERMAFNMPVQGTAADLMKLAMVRLFPQLREVGARMLLQVHDELLLEAPKERAEEVAALAKEVMEGVWPLAVPLEVEVGIGEDWLAAKG

SEQ ID NO: 6331 - DNA, 2523 bp, synthetic construct
  misc_feature 1..2523: note = Variant of DNA polymerase I from Thermus sp. strain 2.9
  source 1..2523: mol_type = other DNA
atgcaccatcatcatcatcatggcggtagcggcgtgttaccggtgttcgagcctaaaggtcgcgtgcttctggttgatggccatcatctcgcgtatcgtaacttctttgccctgaaaggattaaccaccagcctgggcgagccggtacagggtgtctacggctttgcaaagtcgctcctgaaagctctgaaagaagacggtgatgtggtgattgttgtctttgatgcgaaagcgccaagttttcgccacgaagcgtacgaagcttacaaagccgggcgtgctccaacgccggaagactttcctcgccaattggcgcttatgaaggaattagtggatttgcttggcctcgaacgcttggaagttcccggtttcgaggcagacgacgtattagcgactctcgcaaagaaagccgaacgtgagggctatgaagtccagatcttgacagcagatcgcgatcttttccagcttttatctccgcgcatctcggtgttacacccggaagggcatcgtatcaccccggaatggctctgggagaaatatggtttgcgtcccgaacaatgggtggattttcgcgccttagcaggcgatccgagcgacaatattccgggagttaaaggtatcggcgagaagacggcgctcaagctccttaaagaatgggggtcgttggagaacttgcttaagaatttagatcaggtcaaaccagagtcagtgcgtgagaagattcttgctcacctcgaagacctcaaattaagccgcgaattgtcccgtgtacgcaccgatttgccgctcgaagttgatttcggtcgccgccgcgaacctgactgggagggtcttaaagcgtttttagagcgtcttgaatttggttcgctcttgcatgaattcggccttttagaaagcccgttactggccgaagaagcaccttggccaccgcccgagggcgcgtttttaggttaccgtttgagtcgcccggaaccgatgtgggccgaattactggctcttgcagcgtctgcccagggacgtgtgtatcgcgcggaagaccctcatggtgcgctccgcggcctcttcgaagtccgtggactccttgccaaagacttagctgttgttgcattgcgcgaaggtcttgatttacctccgactgatgatccaatgcttcttgcgtacctcttggacccgtcaaacacgacgcccgaaggcggggcccgtcgttacggcggcgagtggaccgaagatgcagcgaaacgcgcgttattggccgaacgtttgcacgaaaatttattaggacgtttgcaaggcgaggaacgtctcctctggctttacgaagaagtggagaaaccattgagtcgcgtgctcgcgcatatggaagctaccggtgtcaaattagacgtggcgtatttggagaatctcagccttgaagttgctgcccacatgcgccgcttggaggaagaagtattccgtttagcaggccgttcctttcgccttaactctcgcgatcagttagaacgtgtgttgttcgatgaacttggtctccctcctatcggcaagacagagaagaccggtaaacgtagcacttcagcggcggttttagaagctcttcgcgaagtccatcccattgtggacaagatcttgcagtaccgcgaaatggcgaaattgaaaggcacctatattgaccgtcttccggcattagtccacccgaaaacgggacgcctccatacccgcttcaaccaaacagccacggcgaccggtcgtttgtcctcctctgatccaaaccttcagaatattccagtacgtaccccattgggccagaagatccgccgtgcgtttgtagctgaggagggttggcgtttagtggccctcgattatcgtcaaattgaattacgtgtccttgcccatctttctggcgatgagaacctcatccgcgtgtttcaggaaggcaaagacattcacactcaaacggcaagctggatgtttggattatcagctgaagcgatcgatcctttgatgcgtcgtgcagcgaagaccatcaatttcggtgttctctacggtatgagtgcctttcgtttgtcgcaggaattaggcattccctatgaagaagctcaggcgttcattcagaaatactttcaaagctatcccaaagttaaagcatggatcgagaagactctccgtgaaggccgcacacgtggttacgtagagaccttatttggacgtcgccgctatgttcccgatttaaacgctcgcgtgaaaggcaagcgtgaagccgccgaacgcatggcgttcaacatgcctgtacagggcacggcagctgacctcatgaaacttgcaatggtgcgcctttttccacaattgcgtgaagttggtgcccgcatgctcttgcaggtccacgatgaactcttgttagaagcgccaaaagagcgtgcggaagaggtggcagccctcgcgaaagaagttatggaaggcgtgtggcccttagcggtgcctcttgaagtcgaagttggtattggcgaggattggctggctgccaaagga

SEQ ID NO: 6332 - protein, 841 aa, synthetic construct
  REGION 1..841: note = Variant of DNA polymerase I from Thermus sp. strain 2.9
MHHHHHHGGSGVLPVFEPKGRVLLVDGHHLAYRNFFALKGLTTSLGEPVQGVYGFAKSLLKALKEDGDVVIVVFDAKAPSFRHEAYEAYKAGRAPTPEDFPRQLALMKELVDLLGLERLEVPGFEADDVLATLAKKAEREGYEVQILTADRDLFQLLSPRISVLHPEGHRITPEWLWEKYGLRPEQWVDFRALAGDPSDNIPGVKGIGEKTALKLLKEWGSLENLLKNLDQVKPESVREKILAHLEDLKLSRELSRVRTDLPLEVDFGRRREPDWEGLKAFLERLEFGSLLHEFGLLESPLLAEEAPWPPPEGAFLGYRLSRPEPMWAELLALAASAQGRVYRAEDPHGALRGLFEVRGLLAKDLAVVALREGLDLPPTDDPMLLAYLLDPSNTTPEGGARRYGGEWTEDAAKRALLAERLHENLLGRLQGEERLLWLYEEVEKPLSRVLAHMEATGVKLDVAYLENLSLEVAAHMRRLEEEVFRLAGRSFRLNSRDQLERVLFDELGLPPIGKTEKTGKRSTSAAVLEALREVHPIVDKILQYREMAKLKGTYIDRLPALVHPKTGRLHTRFNQTATATGRLSSSDPNLQNIPVRTPLGQKIRRAFVAEEGWRLVALDYRQIELRVLAHLSGDENLIRVFQEGKDIHTQTASWMFGLSAEAIDPLMRRAAKTINFGVLYGMSAFRLSQELGIPYEEAQAFIQKYFQSYPKVKAWIEKTLREGRTRGYVETLFGRRRYVPDLNARVKGKREAAERMAFNMPVQGTAADLMKLAMVRLFPQLREVGARMLLQVHDELLLEAPKERAEEVAALAKEVMEGVWPLAVPLEVEVGIGEDWLAAKG

SEQ ID NO: 6333 - DNA, 2523 bp, synthetic construct
  misc_feature 1..2523: note = Variant of DNA polymerase I from Thermus sp. strain 2.9
  source 1..2523: mol_type = other DNA
atgcaccatcatcatcatcatggcggtagcggcgtgttaccggtgttcgagcctaaaggtcgcgtgcttctggttgatggccatcatctcgcgtatcgtaacttctttgccctgaaaggattaaccaccagcctgggcgagccggtacagggtgtctacggctttgcaaagtcgctcctgaaagctctgaaagaagacggtgatgtggtgattgttgtctttgatgcgaaagcgccaagttttcgccacgaagcgtacgaagcttacaaagccgggcgtgctccaacgccggaagactttcctcgccaattggcgcttatgaaggaattagtggatttgcttggcctcgaacgcttggaagttcccggtttcgaggcagacgacgtattagcgactctcgcaaagaaagccgaacgtgagggctatgaagtccagatcttgacagcagatcgcgatcttttccagcttttatctccgcgcatctcggtgttacacccggaagggcatcgtatcaccccggaatggctctgggagaaatatggtttgcgtcccgaacaatgggtggattttcgcgccttagcaggcgatccgagcgacaatattccgggagttaaaggtatcggcgagaagacggcgctcaagctccttaaagaatgggggtcgttggagaacttgcttaagaatttagatcaggtcaaaccagagtcagtgcgtgagaagattcttgctcacctcgaagacctcaaattaagccgcgaattgtcccgtgtacgcaccgatttgccgctcgaagttgatttcggtcgccgccgcgaacctgactgggagggtcttaaagcgtttttagagcgtcttgaatttggttcgctcttgcatgaattcggccttttagaaagcccgttactggccgaagaagcaccttggccaccgcccgagggcgcgtttttaggttaccgtttgagtcgcccggaaccgatgtgggccgaattactggctcttgcagcgtctgcccagggacgtgtgtatcgcgcgctggaccctcatggtgcgctccgcggcctcttcgaagtccgtggactccttgccaaagacttagctgttgttgcattgcgcgaaggtcttgatttacctccgactgatgatccaatgcttcttgcgtacctcttggacccgtcaaacacgacgcccgaaggcgtagcccgtcgttacggcggcgagtggaccgaagatgcagcgaaacgcgcgttattggccgaacgtttgcacgaaaatttattaggacgtttgcaaggcgaggaacgtctcctctggctttacgaagaagtggagaaaccattgagtcgcgtgctcgcgcatatggaagctaccggtgtcaaattagacgtggcgtatttggagaatctcagccttgaagttgctgcccacatgcgccgcttggaggaagaagtattccgtttagcaggccgttcctttcgccttaactctcgcgatcagttagaacgtgtgttgttcgatgaacttggtctccctcctatcggcaagacagagaagaccggtaaacgtagcacttcagcggcggttttagaagctcttcgcgaagtccatcccattgtggacaagatcttgcagtaccgcgaaatggcgaaattgaaaggcacctatattgaccgtcttccggcattagtccacccgaaaacgggacgcctccatacccgcttcaaccaaacagccacggcgaccggtcgtttgtcctcctctgatccaaaccttcagaatattccagtacgtaccccattgggccagaagatccgccgtgcgtttgtagctgaggagggttggcgtttagtggccctcgattatcgtcaaattgaattacgtgtccttgcccatctttctggcgatgagaacctcatccgcgtgtttcaggaaggcaaagacattcacactcaaacggcaagctggatgtttggattatcagctgaagcgatcgatcctttgatgcgtcgtgcagcgaagaccatcaatttcggtgttctctacggtatgagtgcctttcgtttgtcgcaggaattaggcattccctatgaagaagctcaggcgttcattcagaaatactttcaaagctatcccaaagttaaagcatggatcgagaagactctccgtgaaggccgcacacgtggttacgtagagaccttatttggacgtcgccgctatgttcccgatttaaacgctcgcgtgaaaggcaagcgtgaagccgccgaacgcatggcgttcaacatgcctgtacagggcacggcagctgacctcatgaaacttgcaatggtgcgcctttttccacaattgcgtgaagttggtgcccgcatgctcttgcaggtccacgatgaactcttgttagaagcgccaaaagagcgtgcggaagaggtggcagccctcgcgaaagaagttatggaaggcgtgtggcccttagcggtgcctcttgaagtcgaagttggtattggcgaggattggctggctgccaaagga

SEQ ID NO: 6334 - protein, 841 aa, synthetic construct
  REGION 1..841: note = Variant of DNA polymerase I from Thermus sp. strain 2.9
MHHHHHHGGSGVLPVFEPKGRVLLVDGHHLAYRNFFALKGLTTSLGEPVQGVYGFAKSLLKALKEDGDVVIVVFDAKAPSFRHEAYEAYKAGRAPTPEDFPRQLALMKELVDLLGLERLEVPGFEADDVLATLAKKAEREGYEVQILTADRDLFQLLSPRISVLHPEGHRITPEWLWEKYGLRPEQWVDFRALAGDPSDNIPGVKGIGEKTALKLLKEWGSLENLLKNLDQVKPESVREKILAHLEDLKLSRELSRVRTDLPLEVDFGRRREPDWEGLKAFLERLEFGSLLHEFGLLESPLLAEEAPWPPPEGAFLGYRLSRPEPMWAELLALAASAQGRVYRALDPHGALRGLFEVRGLLAKDLAVVALREGLDLPPTDDPMLLAYLLDPSNTTPEGVARRYGGEWTEDAAKRALLAERLHENLLGRLQGEERLLWLYEEVEKPLSRVLAHMEATGVKLDVAYLENLSLEVAAHMRRLEEEVFRLAGRSFRLNSRDQLERVLFDELGLPPIGKTEKTGKRSTSAAVLEALREVHPIVDKILQYREMAKLKGTYIDRLPALVHPKTGRLHTRFNQTATATGRLSSSDPNLQNIPVRTPLGQKIRRAFVAEEGWRLVALDYRQIELRVLAHLSGDENLIRVFQEGKDIHTQTASWMFGLSAEAIDPLMRRAAKTINFGVLYGMSAFRLSQELGIPYEEAQAFIQKYFQSYPKVKAWIEKTLREGRTRGYVETLFGRRRYVPDLNARVKGKREAAERMAFNMPVQGTAADLMKLAMVRLFPQLREVGARMLLQVHDELLLEAPKERAEEVAALAKEVMEGVWPLAVPLEVEVGIGEDWLAAKG

SEQ ID NO: 6335 - DNA, 2523 bp, synthetic construct
  misc_feature 1..2523: note = Variant of DNA polymerase I from Thermus sp. strain 2.9
  source 1..2523: mol_type = other DNA
atgcaccatcatcatcatcatggcggtagcggcgtgttaccggtgttcgagcctaaaggtcgcgtgcttctggttgatggccatcatctcgcgtatcgtaacttctttgccctgaaaggattaaccaccagcctgggcgagccggtacagggtgtctacggctttgcaaagtcgctcctgaaagctctgaaagaagacggtgatgtggtgattgttgtctttgatgcgaaagcgccaagttttcgccacgaagcgtacgaagcttacaaagccgggcgtgctccaacgccggaagactttcctcgccaattggcgcttatgaaggaattagtggatttgcttggcctcgaacgcttggaagttcccggtttcgaggcagacgacgtattagcgactctcgcaaagaaagccgaacgtgagggctatgaagtccagatcttgacagcagatcgcgatcttttccagcttttatctccgcgcatctcggtgttacacccggaagggcatcgtatcaccccggaatggctctgggagaaatatggtttgcgtcccgaacaatgggtggattttcgcgccttagcaggcgatccgagcgacaatattccgggagttaaaggtatcggcgagaagacggcgctcaagctccttaaagaatgggggtcgttggagaacttgcttaagaatttagatcaggtcaaaccagagtcagtgcgtgagaagattcttgctcacctcgaagacctcaaattaagccgcgaattgtcccgtgtacgcaccgatttgccgctcgaagttgatttccgccgccgccgcgaacctgactgggagggtcttaaagcgtttttagagcgtcttgaatttggttcgctcttgcatgaattcggccttttagaaagcccgttactggccgaagaagcaccttggccaccgcccgagggcgcgtttttaggttaccgtttgagtcgcccggaaccgatgtgggccgaattactggctcttgcagcgtctgcccagggacgtgtgtatcgcgcggaagaccctcatggtgcgctccgcggcctcttcgaagtccgtggactccttgccaaagacttagctgttgttgcattgcgcgaaggtcttgatttacctccgactgatgatccaatgcttcttgcgtacctcttggacccgtcaaacacgacgcccgaaggcgtagcccgtcgttacggcggcgagtggaccgaagatgcagcgaaacgcgcgttattggccgaacgtttgcacgcaaatttattaggacgtttgcaaggcgaggaacgtctcctctggctttacgaagaagtggagaaaccattgagtcgcgtgctcgcgcatatggaagctaccggtgtcaaattagacgtggcgtatttggaggcccttagccttgaagttgctgcccacatgcgccgcttggaggaagaagtattccgtttagcaggccgctcctttcgccttaactctcgcgatcagttagaacgtgtgttgttcgatgaacttggtctccctcctatcggcaagacagagaagaccggtaaacgtagcacttcagcggcggttttagaagctcttcgcgaagtccatcccattgtggacaagatcttgcagtaccgcgaactggcgaaattgaaaggcacctatattgaccgtcttccggcattagtccacccgaaaacgggacgcctccatacccgcttcaaccaaacagccacggcgaccggtcgtttgtcctcctctgatccaaaccttcagaatattccagtacgtaccccattgggccagaagatccgccgtgcgtttgtagctgaggagggttggcgtttagtggccctcgattatcgtcaaattgaattacgtgtccttgcccatctttctggcgatgagaacctcatccgcgtgtttcaggaaggcaaagacattcacactcaaacggcaagctggatgtttggattatcagctgaagcgatcgatcctttgatgcgtcgtgcagcgaagaccatcaatttcggtgttctctacggtatgagtgcctttcgtttgtcgcaggaattaggcattccctatgaagaagctcaggcgttcattcagaaatactttcaaagctatcccaaagttaaagcatggatcgagaagactctccgtgaaggccgcacacgtggttacgtagagaccttatttggacgtcgccgctatgttcccgatttaaacgctcgcgtgaaaggcaagcgtgaagccgccgaacgcatggcgttcaacatgcctgtacagggcacggcagctgacctcatgaaacttgcaatggtgcgcctttttccacaattgcgtgaagttggtgcccgcatgctcttgcaggtccacgatgaactcttgttagaagcgccaaaagagcgtgcggaagaggtggcagccctcgcgaaagaagttatggaaggcgtgtggcccttagcggtgcctcttgaagtcgaagttggtattggcgaggattggctggctgccaaagga

SEQ ID NO: 6336 - protein, 841 aa, synthetic construct
  REGION 1..841: note = Variant of DNA polymerase I from Thermus sp. strain 2.9
MHHHHHHGGSGVLPVFEPKGRVLLVDGHHLAYRNFFALKGLTTSLGEPVQGVYGFAKSLLKALKEDGDVVIVVFDAKAPSFRHEAYEAYKAGRAPTPEDFPRQLALMKELVDLLGLERLEVPGFEADDVLATLAKKAEREGYEVQILTADRDLFQLLSPRISVLHPEGHRITPEWLWEKYGLRPEQWVDFRALAGDPSDNIPGVKGIGEKTALKLLKEWGSLENLLKNLDQVKPESVREKILAHLEDLKLSRELSRVRTDLPLEVDFRRRREPDWEGLKAFLERLEFGSLLHEFGLLESPLLAEEAPWPPPEGAFLGYRLSRPEPMWAELLALAASAQGRVYRAEDPHGALRGLFEVRGLLAKDLAVVALREGLDLPPTDDPMLLAYLLDPSNTTPEGVARRYGGEWTEDAAKRALLAERLHANLLGRLQGEERLLWLYEEVEKPLSRVLAHMEATGVKLDVAYLEALSLEVAAHMRRLEEEVFRLAGRSFRLNSRDQLERVLFDELGLPPIGKTEKTGKRSTSAAVLEALREVHPIVDKILQYRELAKLKGTYIDRLPALVHPKTGRLHTRFNQTATATGRLSSSDPNLQNIPVRTPLGQKIRRAFVAEEGWRLVALDYRQIELRVLAHLSGDENLIRVFQEGKDIHTQTASWMFGLSAEAIDPLMRRAAKTINFGVLYGMSAFRLSQELGIPYEEAQAFIQKYFQSYPKVKAWIEKTLREGRTRGYVETLFGRRRYVPDLNARVKGKREAAERMAFNMPVQGTAADLMKLAMVRLFPQLREVGARMLLQVHDELLLEAPKERAEEVAALAKEVMEGVWPLAVPLEVEVGIGEDWLAAKG

SEQ ID NO: 6337 - DNA, 2523 bp, synthetic construct
  misc_feature 1..2523: note = Variant of DNA polymerase I from Thermus sp. strain 2.9
  source 1..2523: mol_type = other DNA
atgcaccatcatcatcatcatggcggtagcggcgtgttaccggtgttcgagcctaaaggtcgcgtgcttctggttgatggccatcatctcgcgtatcgtaacttctttgccctgaaaggattaaccaccagcctgggcgagccggtacagggtgtctacggctttgcaaagtcgctcctgaaagctctgaaagaagacggtgatgtggtgattgttgtctttgatgcgaaagcgccaagttttcgccacgaagcgtacgaagcttacaaagccgggcgtgctccaacgccggaagactttcctcgccaattggcgcttatgaaggaattagtggatttgcttggcctcgaacgcttggaagttcccggtttcgaggcagacgacgtattagcgactctcgcaaagaaagccgaacgtgagggctatgaagtccagatcttgacagcagatcgcgatcttttccagcttttatctccgcgcatctcggtgttacacccggaagggcatcgtatcaccccggaatggctctgggagaaatatggtttgcgtcccgaacaatgggtggattttcgcgccttagcaggcgatccgagcgacaatattccgggagttaaaggtatcggcgagaagacggcgctcaagctccttaaagaatgggggtcgttggagaacttgcttaagaatttagatcaggtcaaaccagagtcagtgcgtgagaagattcttgctcacctcgaagacctcaaattaagccgcgaattgtcccgtgtacgcaccgatttgccgctcgaagttgatttcggtcgccgccgcgaacctgactgggagggtcttaaagcgtttttagagcgtcttgaatttggttcgctcttgcatgaattcggccttttagaaagcccgttactggccgaagaagcaccttggccaccgcccgagggcgcgtttttaggttaccgtttgagtcgcccggaaccgatgtgggccgaattactggctcttgcagcgtctgcccagggacgtgtgtatcgcgcggaagaccctcatggtgcgctccgcggcctcttcgaagtccgtaccctccttgccaaagacttagctgttgttgcattgcgcgaaggtcttgatttacctccgactgatgatccaatgcttcttgcgtacctcttggacccgtcaaacacgacgcccgaaggcgtagcccgtcgttacggcggcgagtggaccgaagatgcagccaaacgcgcgttattggccgaacgtttgcacgaaaatttattaggacgtttgcaaggcgaggaacgtctcctctggctttacgaagaagtggagaaaccattgagtcgcgtgctcgcgcatatggaagctaccggtgtcaaattagacgtggcgtatttggagaatctcagccttgaagttgctgcccacatgcgccgcttggaggaagaagtattccgtttagcaggccgttcctttcgccttaactctcgcgatcagttagaacgtgtgttgttcgatgaacttggtctccctcctatcggcaagacagagaagaccggtaaacgtagcacttcagcggcggttttagaagctcttcgcgaagtccatcccattgtggacaagatcttgcagtaccgcgaaatggcgaaattgaaaggcacctatattgaccgtcttccggcattagtccacccgaaaacgggacgcctccatacccgcttcaaccaaacagccacggcgaccggtcgtttgtcctcctctgatccaaaccttcagaatattccagtacgtaccccattgggccagaagatccgccgtgcgtttgtagctgaggagggttggcgtttagtggccctcgattatcgtcaaattgaattacgtgtccttgcccatctttctggcgatgagaacctcatccgcgtgtttcaggaaggcaaagacattcacactcaaacggcaagctggatgtttggattatcagctgaagcgatcgatcctttgatgcgtcgtgcagcgaagaccatcaatttcggtgttctctacggtatgagtgcctttcgtttgtcgcaggaattaggcattccctatgaagaagctcaggcgttcattcagaaatactttcaaagctatcccaaagttaaagcatggatcgagaagactctccgtgaaggccgcacacgtggttacgtagagaccttatttggacgtcgccgctatgttcccgatttaaacgctcgcgtgaaaggcaagcgtgaagccgccgaacgcatggcgttcaacatgcctgtacagggcacggcagctgacctcatgaaacttgcaatggtgcgcctttttccacaattgcgtgaagttggtgcccgcatggatttgcaggtccacgatgaactcttgttagaagcgccaaaagagcgtgcggaagaggtggcagccctcgcgaaagaagttatggaaggcgtgtggcccttagcggtgcctcttgaagtcgaagttggtattggcgaggattggctggctgccaaagga

SEQ ID NO: 6338 - protein, 841 aa, synthetic construct
  REGION 1..841: note = Variant of DNA polymerase I from Thermus sp. strain 2.9
MHHHHHHGGSGVLPVFEPKGRVLLVDGHHLAYRNFFALKGLTTSLGEPVQGVYGFAKSLLKALKEDGDVVIVVFDAKAPSFRHEAYEAYKAGRAPTPEDFPRQLALMKELVDLLGLERLEVPGFEADDVLATLAKKAEREGYEVQILTADRDLFQLLSPRISVLHPEGHRITPEWLWEKYGLRPEQWVDFRALAGDPSDNIPGVKGIGEKTALKLLKEWGSLENLLKNLDQVKPESVREKILAHLEDLKLSRELSRVRTDLPLEVDFGRRREPDWEGLKAFLERLEFGSLLHEFGLLESPLLAEEAPWPPPEGAFLGYRLSRPEPMWAELLALAASAQGRVYRAEDPHGALRGLFEVRTLLAKDLAVVALREGLDLPPTDDPMLLAYLLDPSNTTPEGVARRYGGEWTEDAAKRALLAERLHENLLGRLQGEERLLWLYEEVEKPLSRVLAHMEATGVKLDVAYLENLSLEVAAHMRRLEEEVFRLAGRSFRLNSRDQLERVLFDELGLPPIGKTEKTGKRSTSAAVLEALREVHPIVDKILQYREMAKLKGTYIDRLPALVHPKTGRLHTRFNQTATATGRLSSSDPNLQNIPVRTPLGQKIRRAFVAEEGWRLVALDYRQIELRVLAHLSGDENLIRVFQEGKDIHTQTASWMFGLSAEAIDPLMRRAAKTINFGVLYGMSAFRLSQELGIPYEEAQAFIQKYFQSYPKVKAWIEKTLREGRTRGYVETLFGRRRYVPDLNARVKGKREAAERMAFNMPVQGTAADLMKLAMVRLFPQLREVGARMDLQVHDELLLEAPKERAEEVAALAKEVMEGVWPLAVPLEVEVGIGEDWLAAKG

SEQ ID NO: 6339 - DNA, 2523 bp, synthetic construct
  misc_feature 1..2523: note = Variant of DNA polymerase I from Thermus sp. strain 2.9
  source 1..2523: mol_type = other DNA
atgcaccatcatcatcatcatggcggtagcggcgtgttaccggtgttcgagcctaaaggtcgcgtgcttctggttgatggccatcatctcgcgtatcgtaacttctttgccctgaaaggattaaccaccagcctgggcgagccggtacagggtgtctacggctttgcaaagtcgctcctgaaagctctgaaagaagacggtgatgtggtgattgttgtctttgatgcgaaagcgccaagttttcgccacgaagcgtacgaagcttacaaagccgggcgtgctccaacgccggaagactttcctcgccaattggcgcttatgaaggaattagtggatttgcttggcctcgaacgcttggaagttcccggtttcgaggcagacgacgtattagcgactctcgcaaagaaagccgaacgtgagggctatgaagtccagatcttgacagcagatcgcgatcttttccagcttttatctccgcgcatctcggtgttacacccggaagggcatcgtatcaccccggaatggctctgggagaaatatggtttgcgtcccgaacaatgggtggattttcgcgccttagcaggcgatccgagcgacaatattccgggagttaaaggtatcggcgagaagacggcgctcaagctccttaaagaatgggggtcgttggagaacttgcttaagaatttagatcaggtcaaaccagagtcagtgcgtgagaagattcttgctcacctcgaagacctcaaattaagccgcgaattgtcccgtgtacgcaccgatttgccgctcgaagttgatttcggtcgccgccgcgaacctgactgggagggtcttaaagcgtttttagagcgtcttgaatttggttcgctcttgcatgaattcggccttttagaaagcccgttactggccgaagaagcaccttggccaccgcccgagggcgcgtttttaggttaccgtttgagtcgcccggaaccgatgtgggccgaattactggctcttgcagcgtctgcccagggacgtgtgtatcgcgcggaagaccctcatggtgcgctccgcggcctcttcgaagtccgtggactccttgccaaagacttagctgttgttgcattgcgcgaaggtcttgatttacctccgactgatgatccaatgcttcttgcgtacctcttggacccgtcaaacacgacgcccgaaggcgtagcccgtcgttacctgggcgagtggaccgaagatgcagcgaaacgcgcgttattggccgaacgtttgcacgaaaatttattaggacgtttgcaaggcgaggaacgtctcctctggctttacgaagaagtggagaaaccattgagtcgcgtgctcgcgcatatggaagctaccggtgtcaaattagacgtggcgtatttggagaatctcagccttgaagttgctgcccacatgcgccgcttggaggaagaagtattccgtttagcaggccgttcctttcgccttaactctcgcgatcagttagaacgtgtgttgttcgatgaacttggtctccctcctatcggcaagacagagaagaccggtaaacgtagcacttcagcggcggttttagaagctcttcgcgaagtccatcccattgtggacaagatcttgcagtaccgcgaaatggcgaaattgaaaggcacctatattgaccgtcttccggcattagtccacccgaaaacgggacgcctccatacccgcttcaaccaaacagccacggcgaccggtcgtttgtcctcctctgatccaaaccttcagaatattccagtacgtaccccattgggccagaagatccgccgtgcgtttgtagctgaggagggttggcgtttagtggccctcgattatcgtcaaattgaattacgtgtccttgcccatctttctggcgatgagaacctcatccgcgtgtttcaggaaggcaaagacattcacactcaaacggcaagctggatgtttggattatcagctgaagcgatcgatcctttgatgcgtcgtgcagcgaagaccatcaatttcggtgttctctacggtatgagtgcctttcgtttgtcgcaggaattaggcattccctatgaagaagctcaggcgttcattcagaaatactttcaaagctatcccaaagttaaagcatggatcgagaagactctccgtgaaggccgcacacgtggttacgtagagaccttatttggacgtcgccgctatgttcccgatttaaacgctcgcgtgaaaggcaagcgtgaagccgccgaacgcatggcgttcaacatgcctgtacagggcacggcagctgacctcatgaaacttgcaatggtgcgcctttttccacaattgcgtgaagttggtgcccgcatgctcttgcaggtccacgatgaactcttgttagaagcgccaaaagagcgtgcggaagaggtggcagccctcgcgaaagaagttatggaaggcgtgtggcccttagcggtgcctcttgaagtcgaagttggtattggcgaggattggctggctgccaaagga

SEQ ID NO: 6340 - protein, 841 aa, synthetic construct
  REGION 1..841: note = Variant of DNA polymerase I from Thermus sp. strain 2.9
MHHHHHHGGSGVLPVFEPKGRVLLVDGHHLAYRNFFALKGLTTSLGEPVQGVYGFAKSLLKALKEDGDVVIVVFDAKAPSFRHEAYEAYKAGRAPTPEDFPRQLALMKELVDLLGLERLEVPGFEADDVLATLAKKAEREGYEVQILTADRDLFQLLSPRISVLHPEGHRITPEWLWEKYGLRPEQWVDFRALAGDPSDNIPGVKGIGEKTALKLLKEWGSLENLLKNLDQVKPESVREKILAHLEDLKLSRELSRVRTDLPLEVDFGRRREPDWEGLKAFLERLEFGSLLHEFGLLESPLLAEEAPWPPPEGAFLGYRLSRPEPMWAELLALAASAQGRVYRAEDPHGALRGLFEVRGLLAKDLAVVALREGLDLPPTDDPMLLAYLLDPSNTTPEGVARRYLGEWTEDAAKRALLAERLHENLLGRLQGEERLLWLYEEVEKPLSRVLAHMEATGVKLDVAYLENLSLEVAAHMRRLEEEVFRLAGRSFRLNSRDQLERVLFDELGLPPIGKTEKTGKRSTSAAVLEALREVHPIVDKILQYREMAKLKGTYIDRLPALVHPKTGRLHTRFNQTATATGRLSSSDPNLQNIPVRTPLGQKIRRAFVAEEGWRLVALDYRQIELRVLAHLSGDENLIRVFQEGKDIHTQTASWMFGLSAEAIDPLMRRAAKTINFGVLYGMSAFRLSQELGIPYEEAQAFIQKYFQSYPKVKAWIEKTLREGRTRGYVETLFGRRRYVPDLNARVKGKREAAERMAFNMPVQGTAADLMKLAMVRLFPQLREVGARMLLQVHDELLLEAPKERAEEVAALAKEVMEGVWPLAVPLEVEVGIGEDWLAAKG

SEQ ID NO: 6341 - DNA, 2523 bp, synthetic construct
  misc_feature 1..2523: note = Variant of DNA polymerase I from Thermus sp. strain 2.9
  source 1..2523: mol_type = other DNA
atgcaccatcatcatcatcatggcggtagcggcgtgttaccggtgttcgagcctaaaggtcgcgtgcttctggttgatggccatcatctcgcgtatcgtaacttctttgccctgaaaggattaaccaccagcctgggcgagccggtacagggtgtctacggctttgcaaagtcgctcctgaaagctctgaaagaagacggtgatgtggtgattgttgtctttgatgcgaaagcgccaagttttcgccacgaagcgtacgaagcttacaaagccgggcgtgctccaacgccggaagactttcctcgccaattggcgcttatgaaggaattagtggatttgcttggcctcgaacgcttggaagttcccggtttcgaggcagacgacgtattagcgactctcgcaaagaaagccgaacgtgagggctatgaagtccagatcttgacagcagatcgcgatcttttccagcttttatctccgcgcatctcggtgttacacccggaagggcatcgtatcaccccggaatggctctgggagaaatatggtttgcgtcccgaacaatgggtggattttcgcgccttagcaggcgatccgagcgacaatattccgggagttaaaggtatcggcgagaagacggcgctcaagctccttaaagaatgggggtcgttggagaacttgcttaagaatttagatcaggtcaaaccagagtcagtgcgtgagaagattcttgctcacctcgaagacctcaaattaagccgcgaattgtcccgtgtacgcaccgatttgccgctcgaagttgatttcggtcgccgccgcgaacctgactgggagggtcttaaagcgtttttagagcgtcttgaatttggttcgctcttgcatgaattcggccttttagaaagcccgttactggccgaagaagcaccttggccaccgcccgagggcgcgtttttaggttaccgtttgagtcgcccggaaccgatgtgggccgaattactggctcttgcagcgtctgcccagggacgtgtgtatcgcgcggaagaccctcatggtgcgctccgcggcctcttcgaagtccgtggactccttgccaaagacttagctgttgttgcattgcgcgaaaagcttgatttacctccgactgatgatccaatgcttcttgcgtacctcttggacccgtcaaacacgacgcccgaaggcgtagcccgtcgttacggcggcgagtggaccgaagatgcagcgaaacgcgcgttattggccgaacgtttgcacgaaaatttattaggacgtttgcaaggcgaggaacgtctcctctggctttacgaagaagtggagaaaccattgagtcgcgtgctcgcgcatatggaagctaccggtgtcaaattagacgtggcgtatttggagaatctcagccttgaagttgctgcccacatgcgccgcttggaggaagaagtattccgtttagcaggccgttcctttcgccttaactctcgcgatcagttagaacgtgtgttgttcgatgaacttggtctccctcctatcggcaagacagagaagaccggtaaacgtagcacttcagcggcggttttagaagctcttcgcgaagtccatcccattgtggacaagatcttgcagtaccgcgaaatggcgaaattgaaaggcacctatattgaccgtcttccggcattagtccacccgaaaacgggacgcctccatacccgcttcaaccaaacagccacggcgaccggtcgtttgtcctcctctgatccaaaccttcagaatattccagtacgtaccccattgggccagaagatccgccgtgcgtttgtagctgaggagggttggcgtttagtggccctcgattatcgtcaaattgaattacgtgtccttgcccatctttctggcgatgagaacctcatccgcgtgtttcaggaaggcaaagacattcacactcaaacggcaagctggatgtttggattatcagctgaagcgatcgatcctttgatgcgtcgtgcagcgaagaccatcaatttcggtgttctctacggtatgagtgcctttcgtttgtcgcaggaattaggcattccctatgaagaagctcaggcgttcattcagaaatactttcaaagctatcccaaagttaaagcatggatcgagaagactctccgtgaaggccgcacacgtggttacgtagagaccttatttggacgtcgccgctatgttcccgatttaaacgctcgcgtgaaaggcaagcgtgaagccgccgaacgcatggcgttcaacatgcctgtacagggcacggcagctgacctcatgaaacttgcaatggtgcgcctttttccacaattgcgtgaagttggtgcccgcatgctcttgcaggtccacgatgaactcttgttagaagcgccaaaagagcgtgcggaagaggtggcagccctcgcgaaagaagttatggaaggcgtgtggcccttagcggtgcctcttgaagtcgaagttggtattggcgaggattggctggctgccaaagga

SEQ ID NO: 6342 - protein, 841 aa, synthetic construct
  REGION 1..841: note = Variant of DNA polymerase I from Thermus sp. strain 2.9
MHHHHHHGGSGVLPVFEPKGRVLLVDGHHLAYRNFFALKGLTTSLGEPVQGVYGFAKSLLKALKEDGDVVIVVFDAKAPSFRHEAYEAYKAGRAPTPEDFPRQLALMKELVDLLGLERLEVPGFEADDVLATLAKKAEREGYEVQILTADRDLFQLLSPRISVLHPEGHRITPEWLWEKYGLRPEQWVDFRALAGDPSDNIPGVKGIGEKTALKLLKEWGSLENLLKNLDQVKPESVREKILAHLEDLKLSRELSRVRTDLPLEVDFGRRREPDWEGLKAFLERLEFGSLLHEFGLLESPLLAEEAPWPPPEGAFLGYRLSRPEPMWAELLALAASAQGRVYRAEDPHGALRGLFEVRGLLAKDLAVVALREKLDLPPTDDPMLLAYLLDPSNTTPEGVARRYGGEWTEDAAKRALLAERLHENLLGRLQGEERLLWLYEEVEKPLSRVLAHMEATGVKLDVAYLENLSLEVAAHMRRLEEEVFRLAGRSFRLNSRDQLERVLFDELGLPPIGKTEKTGKRSTSAAVLEALREVHPIVDKILQYREMAKLKGTYIDRLPALVHPKTGRLHTRFNQTATATGRLSSSDPNLQNIPVRTPLGQKIRRAFVAEEGWRLVALDYRQIELRVLAHLSGDENLIRVFQEGKDIHTQTASWMFGLSAEAIDPLMRRAAKTINFGVLYGMSAFRLSQELGIPYEEAQAFIQKYFQSYPKVKAWIEKTLREGRTRGYVETLFGRRRYVPDLNARVKGKREAAERMAFNMPVQGTAADLMKLAMVRLFPQLREVGARMLLQVHDELLLEAPKERAEEVAALAKEVMEGVWPLAVPLEVEVGIGEDWLAAKG

SEQ ID NO: 6343 - DNA, 2523 bp, synthetic construct
  misc_feature 1..2523: note = Variant of DNA polymerase I from Thermus sp. strain 2.9
  source 1..2523: mol_type = other DNA
atgcaccatcatcatcatcatggcggtagcggcgtgttaccggtgttcgagcctaaaggtcgcgtgcttctggttgatggccatcatctcgcgtatcgtaacttctttgccctgaaaggattaaccaccagcctgggcgagccggtacagggtgtctacggctttgcaaagtcgctcctgaaagctctgaaagaagacggtgatgtggtgattgttgtctttgatgcgaaagcgccaagttttcgccacgaagcgtacgaagcttacaaagccgggcgtgctccaacgccggaagactttcctcgccaattggcgcttatgaaggaattagtggatttgcttggcctcgaacgcttggaagttcccggtttcgaggcagacgacgtattagcgactctcgcaaagaaagccgaacgtgagggctatgaagtccagatcttgacagcagatcgcgatcttttccagcttttatctccgcgcatctcggtgttacacccggaagggcatcgtatcaccccggaatggctctgggagaaatatggtttgcgtcccgaacaatgggtggattttcgcgccttagcaggcgatccgagcgacaatattccgggagttaaaggtatcggcgagaagacggcgctcaagctccttaaagaatgggggtcgttggagaacttgcttaagaatttagatcaggtcaaaccagagtcagtgcgtgagaagattcttgctcacctcgaagacctcaaattaagccgcgaattgtcccgtgtacgcaccgatttgccgctcgaagttgatttcggtcgccgccgcgaacctgactgggagggtcttaaagcgtttttagagcgtcttgaatttggttcgctcttgcatgaattcggccttttagaaagcccgttactggccgaagaagcaccttggccaccgcccgagggcgcgtttttaggttaccgtttgagtcgcccggaaccgatgtgggccgaattactggctcttgcagcgtctgcccagggacgtgtgtatcgcgcggaagaccctcatggtgcgctccgcggcctcttcgaagtccgtggactccttgccaaagacttagctgttgttgcattgcgcgaaggtcttgatttacctccgactgatgatccaatgcttcttgcgtacctcttggacccgtcaaacacgacgcccgaaggcgtagcccgtcgttacggcggcgagtggaccgaagatgcagcgaaacgcgcgttattggccgaacgtttgcacgaaaatttattaggacgtttgcaaggcgaggaacgtctcctctggctttacgaagaagtggagaaaccattgagtcgcgtgctcgcgcatatggaagctaccggtgtcaaattagacgtggcgtatttggagaatctcagccttgaagttgctgcccacatgcgccgcttggaggaagaagtattccgtttagcaggccgttcctttcgccttaactctcgcgatcagttagaacgtgtgttgttcgatgggcttggtctccctcctatcggcaagacagagaagaccggtaaacgtagcacttcagcggcggttttagaagctcttcgcgaagtccatcccattgtggacaagatcttgcagtaccgcgaaatggcgaaattgaaaggcacctatattgaccgtcttccggcattagtccacccgaaaacgggacgcctccatacccgcttcaaccaaacagccacggcgaccggtcgtttgtcctcctctgatccaaaccttcagaatattccagtacgtaccccattgggccagaagatccgccgtgcgtttgtagctgaggagggttggcgtttagtggccctcgattatcgtcaaattgaattacgtgtccttgcccatctttctggcgatgagaacctcatccgcgtgtttcaggaaggcaaagacattcacactcaaacggcaagctggatgtttggattatcagctgaagcgatcgatcctttgatgcgtcgtgcagcgaagaccatcaatttcggtgttctctacggtatgagtgcctttcgtttgtcgcaggaattaggcattccctatgaagaagctcaggcgttcattcagaaatactttcaaagctatcccaaagttaaagcatggatcgagaagactctccgtgaaggccgcacacgtggttacgtagagaccttatttggacgtcgccgctatgttcccgatttaaacgctcgcgtgaaaggcaagcgtgaagccgccgaacgcatggcgttcaacatgcctgtacagggcacggcagctgacctcatgaaacttgcaatggtgcgcctttttccacaattgcgtgaagttggtgcccgcatgctcttgcaggtccacgatgaactcttgttagaagcgccaaaagagcgtgcggaagaggtggcagccctcgcgaaagaagttatggaaggcgtgtggcccttagcggtgcctcttgaagtcgaagttggtattggcgaggattggctggctgccaaagga

SEQ ID NO: 6344 - protein, 841 aa, synthetic construct
  REGION 1..841: note = Variant of DNA polymerase I from Thermus sp. strain 2.9
MHHHHHHGGSGVLPVFEPKGRVLLVDGHHLAYRNFFALKGLTTSLGEPVQGVYGFAKSLLKALKEDGDVVIVVFDAKAPSFRHEAYEAYKAGRAPTPEDFPRQLALMKELVDLLGLERLEVPGFEADDVLATLAKKAEREGYEVQILTADRDLFQLLSPRISVLHPEGHRITPEWLWEKYGLRPEQWVDFRALAGDPSDNIPGVKGIGEKTALKLLKEWGSLENLLKNLDQVKPESVREKILAHLEDLKLSRELSRVRTDLPLEVDFGRRREPDWEGLKAFLERLEFGSLLHEFGLLESPLLAEEAPWPPPEGAFLGYRLSRPEPMWAELLALAASAQGRVYRAEDPHGALRGLFEVRGLLAKDLAVVALREGLDLPPTDDPMLLAYLLDPSNTTPEGVARRYGGEWTEDAAKRALLAERLHENLLGRLQGEERLLWLYEEVEKPLSRVLAHMEATGVKLDVAYLENLSLEVAAHMRRLEEEVFRLAGRSFRLNSRDQLERVLFDGLGLPPIGKTEKTGKRSTSAAVLEALREVHPIVDKILQYREMAKLKGTYIDRLPALVHPKTGRLHTRFNQTATATGRLSSSDPNLQNIPVRTPLGQKIRRAFVAEEGWRLVALDYRQIELRVLAHLSGDENLIRVFQEGKDIHTQTASWMFGLSAEAIDPLMRRAAKTINFGVLYGMSAFRLSQELGIPYEEAQAFIQKYFQSYPKVKAWIEKTLREGRTRGYVETLFGRRRYVPDLNARVKGKREAAERMAFNMPVQGTAADLMKLAMVRLFPQLREVGARMLLQVHDELLLEAPKERAEEVAALAKEVMEGVWPLAVPLEVEVGIGEDWLAAKG

SEQ ID NO: 6345 - DNA, 2523 bp, synthetic construct
  misc_feature 1..2523: note = Variant of DNA polymerase I from Thermus sp. strain 2.9
  source 1..2523: mol_type = other DNA
atgcaccatcatcatcatcatggcggtagcggcgtgttaccggtgttcgagcctaaaggtcgcgtgcttctggttgatggccatcatctcgcgtatcgtaacttctttgccctgaaaggattaaccaccagcctgggcgagccggtacagggtgtctacggctttgcaaagtcgctcctgaaagctctgaaagaagacggtgatgtggtgattgttgtctttgatgcgaaagcgccaagttttcgccacgaagcgtacgaagcttacaaagccgggcgtgctccaacgccggaagactttcctcgccaattggcgcttatgaaggaattagtggatttgcttggcctcgaacgcttggaagttcccggtttcgaggcagacgacgtattagcgactctcgcaaagaaagccgaacgtgagggctatgaagtccagatcttgacagcagatcgcgatcttttccagcttttatctccgcgcatctcggtgttacacccggaagggcatcgtatcaccccggaatggctctgggagaaatatggtttgcgtcccgaacaatgggtggattttcgcgccttagcaggcgatccgagcgacaatattccgggagttaaaggtatcggcgagaagacggcgctcaagctccttaaagaatgggggtcgttggagaacttgcttaagaatttagatcaggtcaaaccagagtcagtgcgtgagaagattcttgctcacctcgaagacctcaaattaagccgcgaattgtcccgtgtacgcaccgatttgccgctcgaagttgatttcggtcgccgccgcgaacctgactgggagggtcttaaagcgtttttagagcgtcttgaatttggttcgctcttgcatgaattcggccttttagaaagcccgttactggccgaagaagcaccttggccaccgcccgagggcgcgtttttaggttaccgtttgagtcgcccggaaccgatgtgggccgaattactggctcttgcagcgtctgcccagggacgtgtgtatcgcgcggaagaccctcatggtgcgctccgcggcctcttcgaagtccgtaccctccttgccaaagacttagctgttgttgcattgcgcgaaggtcttgatttacctccgactgatgatccaatgcttcttgcgtacctcttggacccgtcaaacacgacgcccgaaggcgtagcccgtcgttacggcggcgagtggtgggaagatgcagccaaacgcgcgttattggccgaacgtttgcacgaaaatttattaggacgtttgcaaggcgaggaacgtctcctctggctttacgaagaagtggagaaaccattgagtcgcgtgctcgcgcatatggaagctaccggtgtcaaattagacgtggcgtatttggagaatctcagccttgaagttgctgcccacatgcgccgcttggaggaagaagtattccgtttagcaggccgttcctttcgccttaactctcgcgatcagttagaacgtgtgttgttcgatgaacttggtctccctcctatcggcaagacagagaagaccggtaaacgtagcacttcagcggcggttttagaagctcttcgcgaagtccatcccattgtggacaagatcttgcagtaccgcgaaatggcgaaattgaaaggcacctatattgaccgtcttccggcattagtccacccgaaaacgggacgcctccatacccgcttcaaccaaacagccacggcgaccggtcgtttgtcctcctctgatccaaaccttcagaatattccagtacgtacctttttgggccagaagatccgccgtgcgtttgtagctgaggagggttggcgtttagtggccctcgattatcgtcaaattgaattacgtgtccttgcccatctttctggcgatgagaacctcatccgcgtgtttcaggaaggcaaagacattcacactcaaacggcaagctggatgtttggattatcagctgaagcgatcgatcctttgatgcgtcgtgcagcgaagaccatcaatttcggtgttctctacggtatgagtgcctttcgtttgtcgcaggaattaggcattccctatgaagaagctcagggtttcattcagaaatactttcaaagctatcccaaagttaaagcatggatcgagaagactctccgtgaaggccgcacacgtggttacgtagagaccttatttggacgtcgccgctatgttcccgatttaaacgctcgcgtgaaaggcaagcgtgaagccgccgaacgcatggcgttcaacatgcctgtacagggcacggcagctgacctcatgaaacttgcaatggtgcgcctttttccacaattgcgtgaagttggtgcccgcatgctgttgcaggtccacgatgaactcttgttagaagcgccaaaagagcgtgcggaagaggtggcagccctcgcgaaagaagttatggaaggcgtgtggcccttagcggtgcctcttgaagtcgaagttggtattggcgaggattggctggctgccaaagga

SEQ ID NO: 6346 - protein, 841 aa, synthetic construct
  REGION 1..841: note = Variant of DNA polymerase I from Thermus sp. strain 2.9
MHHHHHHGGSGVLPVFEPKGRVLLVDGHHLAYRNFFALKGLTTSLGEPVQGVYGFAKSLLKALKEDGDVVIVVFDAKAPSFRHEAYEAYKAGRAPTPEDFPRQLALMKELVDLLGLERLEVPGFEADDVLATLAKKAEREGYEVQILTADRDLFQLLSPRISVLHPEGHRITPEWLWEKYGLRPEQWVDFRALAGDPSDNIPGVKGIGEKTALKLLKEWGSLENLLKNLDQVKPESVREKILAHLEDLKLSRELSRVRTDLPLEVDFGRRREPDWEGLKAFLERLEFGSLLHEFGLLESPLLAEEAPWPPPEGAFLGYRLSRPEPMWAELLALAASAQGRVYRAEDPHGALRGLFEVRTLLAKDLAVVALREGLDLPPTDDPMLLAYLLDPSNTTPEGVARRYGGEWWEDAAKRALLAERLHENLLGRLQGEERLLWLYEEVEKPLSRVLAHMEATGVKLDVAYLENLSLEVAAHMRRLEEEVFRLAGRSFRLNSRDQLERVLFDELGLPPIGKTEKTGKRSTSAAVLEALREVHPIVDKILQYREMAKLKGTYIDRLPALVHPKTGRLHTRFNQTATATGRLSSSDPNLQNIPVRTFLGQKIRRAFVAEEGWRLVALDYRQIELRVLAHLSGDENLIRVFQEGKDIHTQTASWMFGLSAEAIDPLMRRAAKTINFGVLYGMSAFRLSQELGIPYEEAQGFIQKYFQSYPKVKAWIEKTLREGRTRGYVETLFGRRRYVPDLNARVKGKREAAERMAFNMPVQGTAADLMKLAMVRLFPQLREVGARMLLQVHDELLLEAPKERAEEVAALAKEVMEGVWPLAVPLEVEVGIGEDWLAAKG

SEQ ID NO: 6347 - DNA, 2523 bp, synthetic construct
  misc_feature 1..2523: note = Variant of DNA polymerase I from Thermus sp. strain 2.9
  source 1..2523: mol_type = other DNA
atgcaccatcatcatcatcatggcggtagcggcgtgttaccggtgttcgagcctaaaggtcgcgtgcttctggttgatggccatcatctcgcgtatcgtaacttctttgccctgaaaggattaaccaccagcctgggcgagccggtacagggtgtctacggctttgcaaagtcgctcctgaaagctctgaaagaagacggtgatgtggtgattgttgtctttgatgcgaaagcgccaagttttcgccacgaagcgtacgaagcttacaaagccgggcgtgctccaacgccggaagactttcctcgccaattggcgcttatgaaggaattagtggatttgcttggcctcgaacgcttggaagttcccggtttcgaggcagacgacgtattagcgactctcgcaaagaaagccgaacgtgagggctatgaagtccagatcttgacagcagatcgcgatcttttccagcttttatctccgcgcatctcggtgttacacccggaagggcatcgtatcaccccggaatggctctgggagaaatatggtttgcgtcccgaacaatgggtggattttcgcgccttagcaggcgatccgagcgacaatattccgggagttaaaggtatcggcgagaagacggcgctcaagctccttaaagaatgggggtcgttggagaacttgcttaagaatttagatcaggtcaaaccagagtcagtgcgtgagaagattcttgctcacctcgaagacctcaaattaagccgcgaattgtcccgtgtacgcaccgatttgccgctcgaagttgatttcggtcgccgccgcgaacctgactgggagggtcttaaagcgtttttagagcgtcttgaatttggttcgctcttgcatgaattcggccttttagaaagcccgttactggccgaagaagcaccttggccaccgcccgagggcgcgtttttaggttaccgtttgagtcgcccggaaccgatgtgggccgaattactggctcttgcagcgtctgcccagggacgtgtgtatcgcgcggaagaccctcatggtgcgctccgcggcctcttcgaagtccgtggactccttgccaaagacttagctgttgttgcattgcgcgaaggtcttgatttacctccgactgatgatccaatgcttcttgcgtacctcttggacccgtcaaacacgacgcccgaaggcgtagcccgtcgttacggcggcgagtggaccgaagatgcagcgaaacgcgcgttattggccgaacgtttgcacgaaaatttattaggacgtttgcaaggcgaggaacgtctcctctggctttacgaagaagtggagaaaccattgagtcgcgtgctcgcgcatatggaagctaccggtgtcaaattagacgtggcgtatttggagaatctcagccttgaagttgctgcccacatgcgccgcttggaggaagaagtattccgtttagcaggccgttcctttcgccttaactctcgcgatcagttagaacgtgtgttgttcgatgaacttggtctccctcctatcggcaagacagagaagaccggtaaacgtagcacttcagcggcggttttagaagctcttcgcgaagtccatcccattgtggacaagatcttgcagtaccgcgaaatggcgaaattgaaaggcacctatattgaccgtcttccggcattagtccacccgaaaacgggacgcctccatacccgcttcaaccaaacagccacggcgaccggtcgtttgtcctcctctgatccaaaccttcagaatattccagtacgtaccccattgggccagaagatccgccgtgcgtttgtagctgaggagggttggcgtttagtggccctcgattatcgtcaaattgaattacgtgtccttgcccatctttctggcgatgagaacctcatccgcgtgtttcaggaaggcaaagacattcacactcaaacggcaagctggatgtttggattatcagctgaagcgatcgatcctttgatgcgtcgtgcagcgaagaccatcaatttcggtgttctctacggtatgagtgcctttcgtttgtcgcaggaattaggcattccctatgaagaagctcaggcgttcattcagaaatactttcaaagctatcccaaagttaaagcatggatcgagaagactctccgtgaaggccgcacacgtggttacgtagagaccttatttggacgtcgccgctatgttcccgatttaaacgcttgggtgaaaggcaagcgtgaagccgccgaacgcatggcgttcaacatgcctgtacagggcacggcagctgacctcatgaaacttgcaatggtgcgcctttttccacaattgcgtgaagttggtgcccgcatgctcttgcaggtccacgatgaactcttgttagaagcgccaaaagagcgtgcggaagaggtggcagccctcgcgaaagaagttatggaaggcgtgtggcccttagcggtgcctcttgaagtcgaagttggtattggcgaggattggctggctgccaaagga

SEQ ID NO: 6348 - protein, 841 aa, synthetic construct
  REGION 1..841: note = Variant of DNA polymerase I from Thermus sp. strain 2.9
MHHHHHHGGSGVLPVFEPKGRVLLVDGHHLAYRNFFALKGLTTSLGEPVQGVYGFAKSLLKALKEDGDVVIVVFDAKAPSFRHEAYEAYKAGRAPTPEDFPRQLALMKELVDLLGLERLEVPGFEADDVLATLAKKAEREGYEVQILTADRDLFQLLSPRISVLHPEGHRITPEWLWEKYGLRPEQWVDFRALAGDPSDNIPGVKGIGEKTALKLLKEWGSLENLLKNLDQVKPESVREKILAHLEDLKLSRELSRVRTDLPLEVDFGRRREPDWEGLKAFLERLEFGSLLHEFGLLESPLLAEEAPWPPPEGAFLGYRLSRPEPMWAELLALAASAQGRVYRAEDPHGALRGLFEVRGLLAKDLAVVALREGLDLPPTDDPMLLAYLLDPSNTTPEGVARRYGGEWTEDAAKRALLAERLHENLLGRLQGEERLLWLYEEVEKPLSRVLAHMEATGVKLDVAYLENLSLEVAAHMRRLEEEVFRLAGRSFRLNSRDQLERVLFDELGLPPIGKTEKTGKRSTSAAVLEALREVHPIVDKILQYREMAKLKGTYIDRLPALVHPKTGRLHTRFNQTATATGRLSSSDPNLQNIPVRTPLGQKIRRAFVAEEGWRLVALDYRQIELRVLAHLSGDENLIRVFQEGKDIHTQTASWMFGLSAEAIDPLMRRAAKTINFGVLYGMSAFRLSQELGIPYEEAQAFIQKYFQSYPKVKAWIEKTLREGRTRGYVETLFGRRRYVPDLNAWVKGKREAAERMAFNMPVQGTAADLMKLAMVRLFPQLREVGARMLLQVHDELLLEAPKERAEEVAALAKEVMEGVWPLAVPLEVEVGIGEDWLAAKG

SEQ ID NO: 6349 - DNA, 2523 bp, synthetic construct
  misc_feature 1..2523: note = Variant of DNA polymerase I from Thermus sp. strain 2.9
  source 1..2523: mol_type = other DNA
atgcaccatcatcatcatcatggcggtagcggcgtgttaccggtgttcgagcctaaaggtcgcgtgcttctggttgatggccatcatctcgcgtatcgtaacttctttgccctgaaaggattaaccaccagcctgggcgagccggtacagggtgtctacggctttgcaaagtcgctcctgaaagctctgaaagaagacggtgatgtggtgattgttgtctttgatgcgaaagcgccaagttttcgccacgaagcgtacgaagcttacaaagccgggcgtgctccaacgccggaagactttcctcgccaattggcgcttatgaaggaattagtggatttgcttggcctcgaacgcttggaagttcccggtttcgaggcagacgacgtattagcgactctcgcaaagaaagccgaacgtgagggctatgaagtccagatcttgacagcagatcgcgatcttttccagcttttatctccgcgcatctcggtgttacacccggaagggcatcgtatcaccccggaatggctctgggagaaatatggtttgcgtcccgaacaatgggtggattttcgcgccttagcaggcgatccgagcgacaatattccgggagttaaaggtatcggcgagaagacggcgctcaagctccttaaagaatgggggtcgttggagaacttgcttaagaatttagatcaggtcaaaccagagtcagtgcgtgagaagattcttgctcacctcgaagacctcaaattaagccgcgaattgtcccgtgtacgcaccgatttgccgctcgaagttgatttcggtcgccgccgcgaacctgactgggagggtcttaaagcgtttttagagcgtcttgaatttggttcgctcttgcatgaattcggccttttagaaagcccgttactggccgaagaagcaccttggccaccgcccgagggcgcgtttttaggttaccgtttgagtcgcccggaaccgatgtgggccgaattactggctcttgcagcgtctgcccagctgcgtgtgtatcgcgcggaagaccctcatggtgcgctccgcggcctcttcgaagtccgtggactccttgccaaagacttagctgttgttgcattgcgcgaaggtcttgatttacctccgactgatgatccaatgcttcttgcgtacctcttggacccgtcaaacacgacgcccgaaggcgtagcccgtcgttacggcggcgagtggaccgaagatgcagcgaaacgcgcgttattggccgaacgtttgcacgaaaatttattaggacgtttgcaaggcgaggaacgtctcctctggctttacgaagaagtggagaaaccattgagtcgcgtgctcgcgcatatggaagctaccggtgtcaaattagacgtggcgtatttggagaatctcagccttgaagttgctgcccacatgcgccgcttggaggaagaagtattccgtttagcaggccgttcctttcgccttaactctcgcgatcagttagaacgtgtgttgttcgatgaacttggtctccctcctatcggcaagacagagaagaccggtaaacgtagcacttcagcggcggttttagaagctcttcgcgaagtccatcccattgtggacaagatcttgcagtaccgcgaaatggcgaaattgaaaggcacctatattgaccgtcttccggcattagtccacccgaaaacgggacgcctccatacccgcttcaaccaaacagccacggcgaccggtcgtttgtcctcctctgatccaaaccttcagaatattccagtacgtaccccattgggccagaagatccgccgtgcgtttgtagctgaggagggttggcgtttagtggccctcgattatcgtcaaattgaattacgtgtccttgcccatctttctggcgatgagaacctcatccgcgtgtttcaggaaggcaaagacattcacactcaaacggcaagctggatgtttggattatcagctgaagcgatcgatcctttgatgcgtcgtgcagcgaagaccatcaatttcggtgttctctacggtatgagtgcctttcgtttgtcgcaggaattaggcattccctatgaagaagctcaggcgttcattcagaaatactttcaaagctatcccaaagttaaagcatggatcgagaagactctccgtgaaggccgcacacgtggttacgtagagaccttatttggacgtcgccgctatgttcccgatttaaacgctcgcgtgaaaggcaagcgtgaagccgccgaacgcatggcgttcaacatgcctgtacagggcacggcagctgacctcatgaaacttgcaatggtgcgcctttttccacaattgcgtgaagttggtgcccgcatgctcttgcaggtccacgatgaactcttgttagaagcgccaaaagagcgtgcggaagaggtggcagccctcgcgaaagaagttatggaaggcgtgtggcccttagcggtgcctcttgaagtcgaagttggtattggcgaggattggctggctgccaaagga

SEQ ID NO: 6350 - protein, 841 aa, synthetic construct
  REGION 1..841: note = Variant of DNA polymerase I from Thermus sp. strain 2.9
MHHHHHHGGSGVLPVFEPKGRVLLVDGHHLAYRNFFALKGLTTSLGEPVQGVYGFAKSLLKALKEDGDVVIVVFDAKAPSFRHEAYEAYKAGRAPTPEDFPRQLALMKELVDLLGLERLEVPGFEADDVLATLAKKAEREGYEVQILTADRDLFQLLSPRISVLHPEGHRITPEWLWEKYGLRPEQWVDFRALAGDPSDNIPGVKGIGEKTALKLLKEWGSLENLLKNLDQVKPESVREKILAHLEDLKLSRELSRVRTDLPLEVDFGRRREPDWEGLKAFLERLEFGSLLHEFGLLESPLLAEEAPWPPPEGAFLGYRLSRPEPMWAELLALAASAQLRVYRAEDPHGALRGLFEVRGLLAKDLAVVALREGLDLPPTDDPMLLAYLLDPSNTTPEGVARRYGGEWTEDAAKRALLAERLHENLLGRLQGEERLLWLYEEVEKPLSRVLAHMEATGVKLDVAYLENLSLEVAAHMRRLEEEVFRLAGRSFRLNSRDQLERVLFDELGLPPIGKTEKTGKRSTSAAVLEALREVHPIVDKILQYREMAKLKGTYIDRLPALVHPKTGRLHTRFNQTATATGRLSSSDPNLQNIPVRTPLGQKIRRAFVAEEGWRLVALDYRQIELRVLAHLSGDENLIRVFQEGKDIHTQTASWMFGLSAEAIDPLMRRAAKTINFGVLYGMSAFRLSQELGIPYEEAQAFIQKYFQSYPKVKAWIEKTLREGRTRGYVETLFGRRRYVPDLNARVKGKREAAERMAFNMPVQGTAADLMKLAMVRLFPQLREVGARMLLQVHDELLLEAPKERAEEVAALAKEVMEGVWPLAVPLEVEVGIGEDWLAAKG

SEQ ID NO: 6351 - DNA, 2523 bp, synthetic construct
  misc_feature 1..2523: note = Variant of DNA polymerase I from Thermus sp. strain 2.9
  source 1..2523: mol_type = other DNA
atgcaccatcatcatcatcatggcggtagcggcgtgttaccggtgttcgagcctaaaggtcgcgtgcttctggttgatggccatcatctcgcgtatcgtaacttctttgccctgaaaggattaaccaccagcctgggcgagccggtacagggtgtctacggctttgcaaagtcgctcctgaaagctctgaaagaagacggtgatgtggtgattgttgtctttgatgcgaaagcgccaagttttcgccacgaagcgtacgaagcttacaaagccgggcgtgctccaacgccggaagactttcctcgccaattggcgcttatgaaggaattagtggatttgcttggcctcgaacgcttggaagttcccggtttcgaggcagacgacgtattagcgactctcgcaaagaaagccgaacgtgagggctatgaagtccagatcttgacagcagatcgcgatcttttccagcttttatctccgcgcatctcggtgttacacccggaagggcatcgtatcaccccggaatggctctgggagaaatatggtttgcgtcccgaacaatgggtggattttcgcgccttagcaggcgatccgagcgacaatattccgggagttaaaggtatcggcgagaagacggcgctcaagctccttaaagaatgggggtcgttggagaacttgcttaagaatttagatcaggtcaaaccagagtcagtgcgtgagaagattcttgctcacctcgaagacctcaaattaagccgcgaattgtcccgtgtacgcaccgatttgccgctcgaagttgatttcggccgccgccgcgaacctgactgggagggtcttaaagcgtttttagagcgtcttgaatttggttcgctcttgcatgaattcggccttttagaaagcccgttactggccgaagaagcaccttggccaccgcccgagggcgcgtttttaggttaccgtttgagtcgcccggaaccgatgtgggccgaattactggctcttgcagcgtctgcccagggacgtgtgtatcgcgcggaagaccctcatggtgcgctccgcggcctcttcgaagtccgtggactccttgccaaagacttagctgttgttgcattgcgcgaaggtcttgatttacctccgactgatgatccaatgcttcttgcgtacctcttggacccgtcaaacacgacgcccgaaggcgtagcccgtcgttacggcggcgagtggaccgaagatgcagcgaaacgcgcgttattggccgaacgtttgcacgcaaatttattaggacgtttgcaaggcgaggaacgtctcctctggctttacgaagaagtggagaaaccattgagtcgcgtgctcgcgcatatggaagctaccggtgtcaaattagacgtggcgtatttggagaatctcagccttgaagttgctgcccatatgcgccgcttggaggaagaagtattccgtttagcaggccgttcctttcgccttaactctcgcgatcagttagaacgtgtgttgttcgatgaacttggtctccctcctatcggcaagacagagaagaccggtaaacgtagcacttcagcggcggttttagaagctcttcgcgaagtccatcccattgtggacaagatcttgcagtaccgcgaaatggcgaaattgaaaggcacctatattgaccgtcttccggcattagtccacccgaaaacgggacgcctccatacccgcttcaaccaaacagccacggcgaccggtcgtttgtccagttctgatccaaaccttcagaatattccagtacgtaccccattgggccagaagatccgccgtgcgtttgtagctgaggagggttggcgtttagtggccctcgattatcgtcaaattgaattacgtgtccttgcccatctttctggcgatgagaacctcatccgcgtgtttcaggaaggcaaagacattcacactcaaacggcaagctggatgtttggattatcagctgaagcgatcgatcctttgatgcgtcgtgcagcgaagaccatcaatttcggtgttctctacggtatgagtgcctttcgtttgtcgcaggaattaggcattccctatgaagaagctcaggcgttcattcagaaatactttcaaagctatcccaaagttaaagcatggatcgagaagactctccgcgaaggccgcacacgtggttacgtagagaccttatttggacgtcgccgctatgttcccgatttaaacgctcgcgtgaaaagcaaacgtgaagccgccgaacgcatggcgttcaacatgcctgtacagggcacggcagctgacctcatgaaacttgcaatggtgcgcctttttccacaattgcgtgaagttggtgcccgcatgctcttgcaggtccacgatgaactcttgttagaagcgccaaaagagcgtgcggaagaggtggcagccctcgcgaaagaagttatggaaggcgtgtggcccttagcggtgcctcttgaagtcgaagttggtattggcgaggattggctggctgccaaagga

SEQ ID NO: 6352 - protein, 841 aa, synthetic construct
  REGION 1..841: note = Variant of DNA polymerase I from Thermus sp. strain 2.9
MHHHHHHGGSGVLPVFEPKGRVLLVDGHHLAYRNFFALKGLTTSLGEPVQGVYGFAKSLLKALKEDGDVVIVVFDAKAPSFRHEAYEAYKAGRAPTPEDFPRQLALMKELVDLLGLERLEVPGFEADDVLATLAKKAEREGYEVQILTADRDLFQLLSPRISVLHPEGHRITPEWLWEKYGLRPEQWVDFRALAGDPSDNIPGVKGIGEKTALKLLKEWGSLENLLKNLDQVKPESVREKILAHLEDLKLSRELSRVRTDLPLEVDFGRRREPDWEGLKAFLERLEFGSLLHEFGLLESPLLAEEAPWPPPEGAFLGYRLSRPEPMWAELLALAASAQGRVYRAEDPHGALRGLFEVRGLLAKDLAVVALREGLDLPPTDDPMLLAYLLDPSNTTPEGVARRYGGEWTEDAAKRALLAERLHANLLGRLQGEERLLWLYEEVEKPLSRVLAHMEATGVKLDVAYLENLSLEVAAHMRRLEEEVFRLAGRSFRLNSRDQLERVLFDELGLPPIGKTEKTGKRSTSAAVLEALREVHPIVDKILQYREMAKLKGTYIDRLPALVHPKTGRLHTRFNQTATATGRLSSSDPNLQNIPVRTPLGQKIRRAFVAEEGWRLVALDYRQIELRVLAHLSGDENLIRVFQEGKDIHTQTASWMFGLSAEAIDPLMRRAAKTINFGVLYGMSAFRLSQELGIPYEEAQAFIQKYFQSYPKVKAWIEKTLREGRTRGYVETLFGRRRYVPDLNARVKSKREAAERMAFNMPVQGTAADLMKLAMVRLFPQLREVGARMLLQVHDELLLEAPKERAEEVAALAKEVMEGVWPLAVPLEVEVGIGEDWLAAKG

SEQ ID NO: 6353 - DNA, 2523 bp, synthetic construct
  misc_feature 1..2523: note = Variant of DNA polymerase I from Thermus sp. strain 2.9
  source 1..2523: mol_type = other DNA
atgcaccatcatcatcatcatggcggtagcggcgtgttaccggtgttcgagcctaaaggtcgcgtgcttctggttgatggccatcatctcgcgtatcgtaacttctttgccctgaaaggattaaccaccagcctgggcgagccggtacagggtgtctacggctttgcaaagtcgctcctgaaagctctgaaagaagacggtgatgtggtgattgttgtctttgatgcgaaagcgccaagttttcgccacgaagcgtacgaagcttacaaagccgggcgtgctccaacgccggaagactttcctcgccaattggcgcttatgaaggaattagtggatttgcttggcctcgaacgcttggaagttcccggtttcgaggcagacgacgtattagcgactctcgcaaagaaagccgaacgtgagggctatgaagtccagatcttgacagcagatcgcgatcttttccagcttttatctccgcgcatctcggtgttacacccggaagggcatcgtatcaccccggaatggctctgggagaaatatggtttgcgtcccgaacaatgggtggattttcgcgccttagcaggcgatccgagcgacaatattccgggagttaaaggtatcggcgagaagacggcgctcaagctccttaaagaatgggggtcgttggagaacttgcttaagaatttagatcaggtcaaaccagagtcagtgcgtgagaagattcttgctcacctcgaagacctcaaattaagccgcgaattgtcccgtgtacgcaccgatttgccgctcgaagttgatttccgccgccgccgcgaacctgactgggagggtcttaaagcgtttttagagcgtcttgaatttggttcgctcttgcatgaattcggccttttagaaagcccgttaccggccgaagaagcaccttggccaccgcccgagggcgcgtttttaggttaccgtttgagtcgcccggaaccgatgtgggccgaattactggctcttgcagcgtctgcccagggacgtgtgtatcgcgcggaagaccctcatggtgcgctccgcggcctcttcgaagtccgtggactccttgccaaagacttagctgttgttgcattgcgcgaaggtcttgatttacctccgactgatgatccaatgcttcttgcgtacctcttggacccgtcaaacacgacgcccgaaggcgtagcccgtcgttacggcggcgagtggaccgaagatgcagcgaaacgcgcgttattggccgaacgtttgcacgaaaatttattaggacgtttgcaaggcgaggaacgtctcctctggctttacgaagaagtggagaaaccattgagtcgcgtgctcgcgcatatggaagctaccggtgtcaaattagacgtggcgtatttggagaatcttagccttgaagttgctgcccacatgcgccgcttggaggaagaagtattccgtttagcaggccgttcctttcgccttaactctcgcgatcagttagaacgtgtgttgttcgatgaacttggtctccctcctatcggcaagacagagaagaccggtaaacgtagcacttcagcggcggttttagaagctcttcgcgaagtccatcccattgtggacaagatcttgcagtaccgcgaaatggcgaaattgaaaggcacctatattgaccgtcttccggcattagtccacccgaaaacgggacgcctccatacccgcttcaaccaaacagccacggcgaccggtcgtttgtccagttctgatccaaaccttcagaatattccagtacgtaccccattgggccagaagatccgccgtgcgtttgtagctgaggagggttggcgtttagtggccctcgattatcgtcaaattgaattacgtgtccttgcccatctttctggcgatgagaacctcatccgcgtgtttcaggaaggcaaagacattcacactcaaacggcaagctggatgtttggattatcagctgaagcgatcgatcctttgatgcgtcgtgcagcgaagaccatcaatttcggtgttctctacggtatgagtgcctttcgtttgtcgcaggaattaggcattccctatgaagaagctcaggcgttcattcagaaatactttcaaagctatcccaaagttaaagcatggatcgagaagactctcgaggaaggccgcacacgtggttacgtagagaccttatttggacgtcgccgctatgttcccgatttaaacgctcgcgtgaaaggcaagcgtgaagccgccgaacgcatggcgttcaacatgcctgtacagggcacggcagctgacctcatgaaacttgcaatggtgcgcctttttccacaattgcgtgaagttggtgcccgcatgctcttgcaggtccacgatgaactcttgttagaagcgccaaaagagcgtgcggaagaggtggcagccctcgcgaaagaagttatggaaggcgtgtggcccttagcggtgcctcttgaagtcgaagttggtattggcgaggattggctggctgccaaagga

SEQ ID NO: 6354 - protein, 841 aa, synthetic construct
  REGION 1..841: note = Variant of DNA polymerase I from Thermus sp. strain 2.9
MHHHHHHGGSGVLPVFEPKGRVLLVDGHHLAYRNFFALKGLTTSLGEPVQGVYGFAKSLLKALKEDGDVVIVVFDAKAPSFRHEAYEAYKAGRAPTPEDFPRQLALMKELVDLLGLERLEVPGFEADDVLATLAKKAEREGYEVQILTADRDLFQLLSPRISVLHPEGHRITPEWLWEKYGLRPEQWVDFRALAGDPSDNIPGVKGIGEKTALKLLKEWGSLENLLKNLDQVKPESVREKILAHLEDLKLSRELSRVRTDLPLEVDFRRRREPDWEGLKAFLERLEFGSLLHEFGLLESPLPAEEAPWPPPEGAFLGYRLSRPEPMWAELLALAASAQGRVYRAEDPHGALRGLFEVRGLLAKDLAVVALREGLDLPPTDDPMLLAYLLDPSNTTPEGVARRYGGEWTEDAAKRALLAERLHENLLGRLQGEERLLWLYEEVEKPLSRVLAHMEATGVKLDVAYLENLSLEVAAHMRRLEEEVFRLAGRSFRLNSRDQLERVLFDELGLPPIGKTEKTGKRSTSAAVLEALREVHPIVDKILQYREMAKLKGTYIDRLPALVHPKTGRLHTRFNQTATATGRLSSSDPNLQNIPVRTPLGQKIRRAFVAEEGWRLVALDYRQIELRVLAHLSGDENLIRVFQEGKDIHTQTASWMFGLSAEAIDPLMRRAAKTINFGVLYGMSAFRLSQELGIPYEEAQAFIQKYFQSYPKVKAWIEKTLEEGRTRGYVETLFGRRRYVPDLNARVKGKREAAERMAFNMPVQGTAADLMKLAMVRLFPQLREVGARMLLQVHDELLLEAPKERAEEVAALAKEVMEGVWPLAVPLEVEVGIGEDWLAAKG

SEQ ID NO: 6355 - DNA, 2523 bp, synthetic construct
  misc_feature 1..2523: note = Variant of DNA polymerase I from Thermus sp. strain 2.9
  source 1..2523: mol_type = other DNA
atgcaccatcatcatcatcatggcggtagcggcgtgttaccggtgttcgagcctaaaggtcgcgtgcttctggttgatggccatcatctcgcgtatcgtaacttctttgccctgaaaggattaaccaccagcctgggcgagccggtacagggtgtctacggctttgcaaagtcgctcctgaaagctctgaaagaagacggtgatgtggtgattgttgtctttgatgcgaaagcgccaagttttcgccacgaagcgtacgaagcttacaaagccgggcgtgctccaacgccggaagactttcctcgccaattggcgcttatgaaggaattagtggatttgcttggcctcgaacgcttggaagttcccggtttcgaggcagacgacgtattagcgactctcgcaaagaaagccgaacgtgagggctatgaagtccagatcttgacagcagatcgcgatcttttccagcttttatctccgcgcatctcggtgttacacccggaagggcatcgtatcaccccggaatggctctgggagaaatatggtttgcgtcccgaacaatgggtggattttcgcgccttagcaggcgatccgagcgacaatattccgggagttaaaggtatcggcgagaagacggcgctcaagctccttaaagaatgggggtcgttggagaacttgcttaagaatttagatcaggtcaaaccagagtcagtgcgtgagaagattcttgctcacctcgaagacctcaaattaagccgcgaattgtcccgtgtacgcaccgatttgccgctcgaagttgatttcggtcgccgccgcgaacctgactgggagggtcttaaagcgtttttagagcgtcttgaatttggttcgctcttgcatgaattcggccttttagaaagcccgttactggccgaagaagcaccttggccaccgcccgagggcgcgtttttaggttaccgtttgagtcgcccggaaccgatgtgggccgaattactggctcttgcagcgtctgcccagggacgtgtgtatcgcgcggaagaccctcatggtgcgctccgcggcctcttcgaagtccgtggactccttgccaaagacttagctgttgttgcattgcgcgaaggtcttgatttacctccgactgatgatccaatgcttcttgcgtacctcttggacccgtcaaacacgacgcccgaaggcgtagcccgtcgttacggcggcgagtggaccgaagatgcagcgaaacgcgcgttattggccgaacgtttgcacgaaaatttattaggacgtttgcaaggcgaggaacgtctcctctggctttacgaagaagtggagaaaccattgagtcgcgtgctcgcgcatatggaagctaccggtgtcaaattagacgtggcgtatttggagaatctcagccttgaagttgctgcccacatgcgccgcttggaggaagaagtattccgtttagcaggccgttcctttcgccttaactctcgcgatcagttagaacgtgtgttgttcgatgaacttggtctccctcctatcggcaagacagagaagaccggtaaacgtagcacttcagcggcggttttagaagctcttcgcgaagtccatcccattgtggacaagatcttgcagtaccgcgaaatggcgaaattgaaaggcacctatattgaccgtcttccggcattagtccacccgaaaacgggacgcctccatacccgcttcaaccaaacagccacggcgaccggtcgtttgtcctcctctgatccaaaccttcagaatattccagtacgtaccccattgggccagaagatccgccgtgcgtttgtagctgaggagggttggcgtttagtggccctcgattatcgtcaaattgaattacgtgtccttgcccatctttctggcgatgagaacctcatccgcgtgtttcaggaaggcaaagacattcacactcaaacggcaagctggatgtttggattatcagctgaagcgatcgatcctttgatgcgtcgtgcagcgaagaccatcaatttcggtgttctctacggtatgagtgcctttcgtttgtcgcaggaattaggcattccctatgaagaagctcaggcgttcattcagaaatactttcaaagctatcccaaagttaaagcatggatcgagaagactctccgtgaaggccgcacacgtggttacgtagagaccttatttggacgtcgccgctatgttcccgatttaaacgctcgcgtgaaaggcaagcgtgaagccgccgaacgcatggcgttcaacatgcctgtacagggcacggcagctgacctcatgaaacttgcaatggtgcgcctttttccacaattgcgtgaagttggtgcccgcatgctcttgacggtccacgatgaactcttgttagaagcgccaaaagagcgtgcggaagaggtggcagccctcgcgaaagaagttatggaaggcgtgtggcccttagcggtgcctcttgaagtcgaagttggtattggcgaggattggctggctgccaaagga

SEQ ID NO: 6356 - protein, 841 aa, synthetic construct
  REGION 1..841: note = Variant of DNA polymerase I from Thermus sp. strain 2.9
MHHHHHHGGSGVLPVFEPKGRVLLVDGHHLAYRNFFALKGLTTSLGEPVQGVYGFAKSLLKALKEDGDVVIVVFDAKAPSFRHEAYEAYKAGRAPTPEDFPRQLALMKELVDLLGLERLEVPGFEADDVLATLAKKAEREGYEVQILTADRDLFQLLSPRISVLHPEGHRITPEWLWEKYGLRPEQWVDFRALAGDPSDNIPGVKGIGEKTALKLLKEWGSLENLLKNLDQVKPESVREKILAHLEDLKLSRELSRVRTDLPLEVDFGRRREPDWEGLKAFLERLEFGSLLHEFGLLESPLLAEEAPWPPPEGAFLGYRLSRPEPMWAELLALAASAQGRVYRAEDPHGALRGLFEVRGLLAKDLAVVALREGLDLPPTDDPMLLAYLLDPSNTTPEGVARRYGGEWTEDAAKRALLAERLHENLLGRLQGEERLLWLYEEVEKPLSRVLAHMEATGVKLDVAYLENLSLEVAAHMRRLEEEVFRLAGRSFRLNSRDQLERVLFDELGLPPIGKTEKTGKRSTSAAVLEALREVHPIVDKILQYREMAKLKGTYIDRLPALVHPKTGRLHTRFNQTATATGRLSSSDPNLQNIPVRTPLGQKIRRAFVAEEGWRLVALDYRQIELRVLAHLSGDENLIRVFQEGKDIHTQTASWMFGLSAEAIDPLMRRAAKTINFGVLYGMSAFRLSQELGIPYEEAQAFIQKYFQSYPKVKAWIEKTLREGRTRGYVETLFGRRRYVPDLNARVKGKREAAERMAFNMPVQGTAADLMKLAMVRLFPQLREVGARMLLTVHDELLLEAPKERAEEVAALAKEVMEGVWPLAVPLEVEVGIGEDWLAAKG

SEQ ID NO: 6357 - DNA, 2523 bp, synthetic construct
  misc_feature 1..2523: note = Variant of DNA polymerase I from Thermus sp. strain 2.9
  source 1..2523: mol_type = other DNA
atgcaccatcatcatcatcatggcggtagcggcgtgttaccggtgttcgagcctaaaggtcgcgtgcttctggttgatggccatcatctcgcgtatcgtaacttctttgccctgaaaggattaaccaccagcctgggcgagccggtacagggtgtctacggctttgcaaagtcgctcctgaaagctctgaaagaagacggtgatgtggtgattgttgtctttgatgcgaaagcgccaagttttcgccacgaagcgtacgaagcttacaaagccgggcgtgctccaacgccggaagactttcctcgccaattggcgcttatgaaggaattagtggatttgcttggcctcgaacgcttggaagttcccggtttcgaggcagacgacgtattagcgactctcgcaaagaaagccgaacgtgagggctatgaagtccagatcttgacagcagatcgcgatcttttccagcttttatctccgcgcatctcggtgttacacccggaagggcatcgtatcaccccggaatggctctgggagaaatatggtttgcgtcccgaacaatgggtggattttcgcgccttagcaggcgatccgagcgacaatattccgggagttaaaggtatcggcgagaagacggcgctcaagctccttaaagaatgggggtcgttggagaacttgcttaagaatttagatcaggtcaaaccagagtcagtgcgtgagaagattcttgctcacctcgaagacctcaaattaagccgcgaattgtcccgtgtacgcaccgatttgccgctcgaagttgatttcggtcgccgccgcgaacctgactgggagggtcttaaagcgtttttagagcgtcttgaatttggttcgctcttgcatgaattcggccttttagaaagcccgttactggccgaagaagcaccttggccaccgcccgagggcgcgtttttaggttaccgtttgagtcgcccggaaccgatgtgggccgaattactggctcttgcagcgtctgcccagggacgtgtgtatcgcgcggaagaccctcatggtgcgctccgcggcctcttcgaagtccgtggactccttgccaaagacttagctgttgttgcattgcgcgaaggtcttgatttacctccgactgatgatccaatgcttcttgcgtacctcttggacccgtcaaacacgacgcccgaaggcgtagcccgtcgttacggcggcgagtggaccgaagatgcagcgaaacgcgcgttattggccgaacgtttgcacgaaaatttattaggacgtttgcaaggcgaggaacgtctcctctggctttacgaagaagtggagaaaccattgagtcgcgtgctcgcgcatatggaagctaccggtgtcaaattagacgtggcgtatttggagaatctcagccttgaagttgctgcccacatgcgccgcttggaggaagaagtattccgtttagcaggccgttcctttcgccttaactctcgcgatcagttagaacgtgtgttgttcgatgaacttggtctccctcctatcggcaagacagagaagaccggtaaacgtagcacttcagcggcggttttagaagctcttcgcgaagtccatcccattgtggacaagatctggcagtaccgcgaaatggcgaaattgaaaggcacctatattgaccgtcttccggcattagtccacccgaaaacgggacgcctccatacccgcttcaaccaaacagccacggcgaccggtcgtttgtcctcctctgatccaaaccttcagaatattccagtacgtaccccattgggccagaagatccgccgtgcgtttgtagctgaggagggttggcgtttagtggccctcgattatcgtcaaattgaattacgtgtccttgcccatctttctggcgatgagaacctcatccgcgtgtttcaggaaggcaaagacattcacactcaaacggcaagctggatgtttggattatcagctgaagcgatcgatcctttgatgcgtcgtgcagcgaagaccatcaatttcggtgttctctacggtatgagtgcctttcgtttgtcgcaggaattaggcattccctatgaagaagctcaggcgttcattcagaaatactttcaaagctatcccaaagttaaagcatggatcgagaagactctccgtgaaggccgcacacgtggttacgtagagaccttatttggacgtcgccgctatgttcccgatttaaacgctcgcgtgaaaggcaagcgtgaagccgccgaacgcatggcgttcaacatgcctgtacagggcacggcagctgacctcatgaaacttgcaatggtgcgcctttttccacaattgcgtgaagttggtgcccgcatgctcttgcaggtccacgatgaactcttgttagaagcgccaaaagagcgtgcggaagaggtggcagccctcgcgaaagaagttatggaaggcgtgtggcccttagcggtgcctcttgaagtcgaagttggtattggcgaggattggctggctgccaaagga

SEQ ID NO: 6358 - protein, 841 aa, synthetic construct
  REGION 1..841: note = Variant of DNA polymerase I from Thermus sp. strain 2.9
MHHHHHHGGSGVLPVFEPKGRVLLVDGHHLAYRNFFALKGLTTSLGEPVQGVYGFAKSLLKALKEDGDVVIVVFDAKAPSFRHEAYEAYKAGRAPTPEDFPRQLALMKELVDLLGLERLEVPGFEADDVLATLAKKAEREGYEVQILTADRDLFQLLSPRISVLHPEGHRITPEWLWEKYGLRPEQWVDFRALAGDPSDNIPGVKGIGEKTALKLLKEWGSLENLLKNLDQVKPESVREKILAHLEDLKLSRELSRVRTDLPLEVDFGRRREPDWEGLKAFLERLEFGSLLHEFGLLESPLLAEEAPWPPPEGAFLGYRLSRPEPMWAELLALAASAQGRVYRAEDPHGALRGLFEVRGLLAKDLAVVALREGLDLPPTDDPMLLAYLLDPSNTTPEGVARRYGGEWTEDAAKRALLAERLHENLLGRLQGEERLLWLYEEVEKPLSRVLAHMEATGVKLDVAYLENLSLEVAAHMRRLEEEVFRLAGRSFRLNSRDQLERVLFDELGLPPIGKTEKTGKRSTSAAVLEALREVHPIVDKIWQYREMAKLKGTYIDRLPALVHPKTGRLHTRFNQTATATGRLSSSDPNLQNIPVRTPLGQKIRRAFVAEEGWRLVALDYRQIELRVLAHLSGDENLIRVFQEGKDIHTQTASWMFGLSAEAIDPLMRRAAKTINFGVLYGMSAFRLSQELGIPYEEAQAFIQKYFQSYPKVKAWIEKTLREGRTRGYVETLFGRRRYVPDLNARVKGKREAAERMAFNMPVQGTAADLMKLAMVRLFPQLREVGARMLLQVHDELLLEAPKERAEEVAALAKEVMEGVWPLAVPLEVEVGIGEDWLAAKG

SEQ ID NO: 6359 - DNA, 2523 bp, synthetic construct
  misc_feature 1..2523: note = Variant of DNA polymerase I from Thermus sp. strain 2.9
  source 1..2523: mol_type = other DNA
atgcaccatcatcatcatcatggcggtagcggcgtgttaccggtgttcgagcctaaaggtcgcgtgcttctggttgatggccatcatctcgcgtatcgtaacttctttgccctgaaaggattaaccaccagccgcggcgagccggtacagggtgtctacggctttgcaaagtcgctcctgaaagctctgaaagaagacggtgatgtggtgattgttgtctttgatgcgaaagcgccaagttttcgccacgaagcgtacgaagcttacaaagccgggcgtgctccaacgccggaagactttcctcgccaattggcgcttatgaaggaattagtggatttgcttggcctcgaacgcttggaagttcccggtttcgaggcagacgacgtattagcgactctcgcaaagaaagccgaacgtgagggctatgaagtccagatcttgacagcagatcgcgatcttttccagcttttatctccgcgcatctcggtgttacacccggaagggcatcgtatcaccccggaatggctctgggagaaatatggtttgcgtcccgaacaatgggtggattttcgcgccttagcaggcgatccgagcgacaatattccgggagttaaaggtatcggcgagaagacggcgctcaagctccttaaagaatgggggtcgttggagaacttgcttaagaatttagatcaggtcaaaccagagtcagtgcgtgagaagattcttgctcacctcgaagacctcaaattaagccgcgaattgtcccgtgtacgcaccgatttgccgctcgaagttgatttcggccgccgccgcgaacctgactgggagggtcttaaagcgtttttagagcgtcttgaatttggttcgctcttgcatgaattcggccttttagaaagcccgttaccggccgaagaagcaccttggccaccgcccgagggcgcgtttttaggttaccgtttgagtcgcccggaaccgatgtgggccgaattactggctcttgcagcgtctgcccagggacgtgtgtatcgcgcggaagaccctcatggtgcgctccgcggcctcttcgaagtccgtggactccttgccaaagacttagctgttgttgcattgcgcgaaggtcttgatttacctccgactgatgatccaatgcttcttgcgtacctcttggacccgtcaaacacgacgcccgaaggcgtagcccgtcgttacggcggcgagtggaccgaagatgcagcgaaacgcgcgttattggccgaacgtttgcacgcaaatttattaggacgtttgcaaggcgaggaacgtctcctctggctttacgaagaagtggagaaaccattgagtcgcgtgctcgcgcatatggaagctaccggtgtcaaattagacgtggcgtatttggagaatcttcaccttgaagttgctgcccacatgcgccgcttggaggaagaagtattccgtttagcaggccgttcctttcgccttaactctcgcgatcagttagaacgtgtgttgttcgatgaacttggtctccctcctatcggcaagacagagaagaccggtaaacgtagcacttcagcggcggttttagaagctcttcgcgaagtccatcccattgtggacaagatcttgcagtaccgcgaaatggcgaaattgaaaggcacctatattgaccgtcttccggcattagtccacccgaaaacgggacgcctccatacccgcttcaaccaaacagccacggcgaccggtcgtttgtcctcctctgatccaaaccttcagaatattccagtacgtaccccattgggccagaagatccgccgtgcgtttgtagctgaggagggttggcgtttagtggccctcgattatagtcaaattgaattacgtgtccttgcccatctttctggcgatgagaacctcatccgcgtgtttcaggaaggcaaagacattcacactcaaacggcaagctggatgtttggattatcagctgaagcgatcgatcctttgatgcgtcgtgcagcgaagaccatcaatttcggtgttctctacggtatgagtgcctttcgtttgtcgcaggaattaggcattccctatgaagaagctcaggcgttcattcagaaatactttcaaagctatcccaaagttaaagcatggatcgagaagactctcgaggaaggccgcacacgtggttacgtagagaccttatttggacgtcgccgctatgttcccgatttaaacgctcgcgtgaaaagcgtacgtgaagccgccgaacgcatggcgttcaacatgcctgtacagggcacggcagctgacctcatgaaacttgcaatggtgcgcctttttccacaattgcgtgaagttggtgcccgcatgctcttgcaggtccacgatgaactcttgttagaagcgccaaaagagcgtgcggaagaggtggcagccctcgcgaaagaagttatggaaggcgtgtggcccttagcggtgcctcttgaagtcgaagttggtattggcgaggattggctggctgccaaagga

SEQ ID NO: 6360 - protein, 841 aa, synthetic construct
  REGION 1..841: note = Variant of DNA polymerase I from Thermus sp. strain 2.9
MHHHHHHGGSGVLPVFEPKGRVLLVDGHHLAYRNFFALKGLTTSRGEPVQGVYGFAKSLLKALKEDGDVVIVVFDAKAPSFRHEAYEAYKAGRAPTPEDFPRQLALMKELVDLLGLERLEVPGFEADDVLATLAKKAEREGYEVQILTADRDLFQLLSPRISVLHPEGHRITPEWLWEKYGLRPEQWVDFRALAGDPSDNIPGVKGIGEKTALKLLKEWGSLENLLKNLDQVKPESVREKILAHLEDLKLSRELSRVRTDLPLEVDFGRRREPDWEGLKAFLERLEFGSLLHEFGLLESPLPAEEAPWPPPEGAFLGYRLSRPEPMWAELLALAASAQGRVYRAEDPHGALRGLFEVRGLLAKDLAVVALREGLDLPPTDDPMLLAYLLDPSNTTPEGVARRYGGEWTEDAAKRALLAERLHANLLGRLQGEERLLWLYEEVEKPLSRVLAHMEATGVKLDVAYLENLHLEVAAHMRRLEEEVFRLAGRSFRLNSRDQLERVLFDELGLPPIGKTEKTGKRSTSAAVLEALREVHPIVDKILQYREMAKLKGTYIDRLPALVHPKTGRLHTRFNQTATATGRLSSSDPNLQNIPVRTPLGQKIRRAFVAEEGWRLVALDYSQIELRVLAHLSGDENLIRVFQEGKDIHTQTASWMFGLSAEAIDPLMRRAAKTINFGVLYGMSAFRLSQELGIPYEEAQAFIQKYFQSYPKVKAWIEKTLEEGRTRGYVETLFGRRRYVPDLNARVKSVREAAERMAFNMPVQGTAADLMKLAMVRLFPQLREVGARMLLQVHDELLLEAPKERAEEVAALAKEVMEGVWPLAVPLEVEVGIGEDWLAAKG

SEQ ID NO: 6361 - DNA, 2523 bp, synthetic construct
  misc_feature 1..2523: note = Variant of DNA polymerase I from Thermus sp. strain 2.9
  source 1..2523: mol_type = other DNA
atgcaccatcatcatcatcatggcggtagcggcgtgttaccggtgttcgagcctaaaggtcgcgtgcttctggttgatggccatcatctcgcgtatcgtaacttctttgccctgaaaggattaaccaccagcctgggcgagccggtacagggtgtctacggctttgcaaagtcgctcctgaaagctctgaaagaagacggtgatgtggtgattgttgtctttgatgcgaaagcgccaagttttcgccacgaagcgtacgaagcttacaaagccgggcgtgctccaacgccggaagactttcctcgccaattggcgcttatgaaggaattagtggatttgcttggcctcgaacgcttggaagttcccggtttcgaggcagacgacgtattagcgactctcgcaaagaaagccgaacgtgagggctatgaagtccagatcttgacagcagatcgcgatcttttccagcttttatctccgcgcatctcggtgttacacccggaagggcatcgtatcaccccggaatggctctgggagaaatatggtttgcgtcccgaacaatgggtggattttcgcgccttagcaggcgatccgagcgacaatattccgggagttaaaggtatcggcgagaagacggcgctcaagctccttaaagaatgggggtcgttggagaacttgcttaagaatttagatcaggtcaaaccagagtcagtgcgtgagaagattcttgctcacctcgaagacctcaaattaagccgcgaattgtcccgtgtacgcaccgatttgccgctcgaagttgatttcggtcgccgccgcgaacctgactgggagggtcttaaagcgtttttagagcgtcttgaatttggttcgctcttgcatgaattcggccttttagaaagcccgttactggccgaagaagcaccttggccaccgcccgagggcgcgtttttaggttaccgtttgagtcgcccggaaccgatgtgggccgaattactggctcttgcagcgtctgcccagggacgtgtgtatcgcgcggaagaccctcatggtgcgctccgcggcctcttcgaagtccgtggcctccttgccaaagacttagctgttgttgcattgcgcgaaggtcttgatttacctccgactgatgatccaatgcttcttgcgtacctcttggacccgtcaaacacgacgcccgaaggcgtagcccgtcgttacggcggcgagtggaccgaagatgcaggcaaacgcgcgttattggccgaacgtttgcacgaaaatttattaggacgtttgcaaggcgaggaacgtctcctctggctttacgaagaagtggagaaaccattgagtcgcgtgctcgcgcatatggaagctaccggtgtcaaattagacgtggcgtatttggagaatctcagccttgaagttgctgcccacatgcgccgcttggaggaagaagtattccgtttagcaggccgttcctttcgccttaactctcgcgatcagttagaacgtgtgttgttcgatgaacttggtctccctcctatcggcaagacagagaagaccggtaaacgtagcacttcagcggcggttttagaagctcttcgcgaagtccatcccattgtggacaagatcttgcagtaccgcgaaatggcgaaattgaaaggcacctatattgaccgtcttccggcattagtccacccgaaaacgggacgcctccatacccgcttcaaccaaacagccacggcgaccggtcgtttgtcctcctctgatccaaaccttcagaatattccagtacgtaccccattgggccagaagatccgccgtgcgtttgtagctgagccgggttggcgtttagtggccctcgattatcgtcaaattgaattacgtgtccttgcccatctttctggcgatgagaacctcatccgcgtgtttcaggaaggcaaagacattcacactcaaacggcaagctggatgtttggattatcagctgaagcgatcgatcctttgatgcgtcgtgcagcgaagaccatcaatttcggtgttctctacggtatgagtgcctttcgtttgtcgcaggaattaggcattccctatgaagaagctcaggcgttcattcagaaatactttcaaagctatcccaaagttaaagcatggatcgagaagactctccgtgaaggccgcacacgtggttacgtagagaccttatttggacgtcgccgctatgttcccgatttaaacgctcgcgtgaaaggcaagcgtgaagccgccgaacgcatggcgttcaacatgcctgtacagggcacggcagctgacctcatgaaacttgcaatggtgcgcctttttccacaattgcgtgaagttggtgcccgcatggatttgcaggtccacgatgaactcttgttagaagcgccaaaagagcgtgcggaagaggtggcagccctcgcgaaagaagttatggaaggcgtgtggcccttagcggtgcctcttgaagtcgaagttggtattggcgaggattggctggctgccaaagga

SEQ ID NO: 6362 - protein, 841 aa, synthetic construct
  REGION 1..841: note = Variant of DNA polymerase I from Thermus sp. strain 2.9
MHHHHHHGGSGVLPVFEPKGRVLLVDGHHLAYRNFFALKGLTTSLGEPVQGVYGFAKSLLKALKEDGDVVIVVFDAKAPSFRHEAYEAYKAGRAPTPEDFPRQLALMKELVDLLGLERLEVPGFEADDVLATLAKKAEREGYEVQILTADRDLFQLLSPRISVLHPEGHRITPEWLWEKYGLRPEQWVDFRALAGDPSDNIPGVKGIGEKTALKLLKEWGSLENLLKNLDQVKPESVREKILAHLEDLKLSRELSRVRTDLPLEVDFGRRREPDWEGLKAFLERLEFGSLLHEFGLLESPLLAEEAPWPPPEGAFLGYRLSRPEPMWAELLALAASAQGRVYRAEDPHGALRGLFEVRGLLAKDLAVVALREGLDLPPTDDPMLLAYLLDPSNTTPEGVARRYGGEWTEDAGKRALLAERLHENLLGRLQGEERLLWLYEEVEKPLSRVLAHMEATGVKLDVAYLENLSLEVAAHMRRLEEEVFRLAGRSFRLNSRDQLERVLFDELGLPPIGKTEKTGKRSTSAAVLEALREVHPIVDKILQYREMAKLKGTYIDRLPALVHPKTGRLHTRFNQTATATGRLSSSDPNLQNIPVRTPLGQKIRRAFVAEPGWRLVALDYRQIELRVLAHLSGDENLIRVFQEGKDIHTQTASWMFGLSAEAIDPLMRRAAKTINFGVLYGMSAFRLSQELGIPYEEAQAFIQKYFQSYPKVKAWIEKTLREGRTRGYVETLFGRRRYVPDLNARVKGKREAAERMAFNMPVQGTAADLMKLAMVRLFPQLREVGARMDLQVHDELLLEAPKERAEEVAALAKEVMEGVWPLAVPLEVEVGIGEDWLAAKG

SEQ ID NO: 6363 - DNA, 2523 bp, synthetic construct
  misc_feature 1..2523: note = Variant of DNA polymerase I from Thermus sp. strain 2.9
  source 1..2523: mol_type = other DNA
atgcaccatcatcatcatcatggcggtagcggcgtgttaccggtgttcgagcctaaaggtcgcgtgcttctggttgatggccatcatctcgcgtatcgtaacttctttgccctgaaaggattaaccaccagcctgggcgagccggtacagggtgtctacggctttgcaaagtcgctcctgaaagctctgaaagaagacggtgatgtggtgattgttgtctttgatgcgaaagcgccaagttttcgccacgaagcgtacgaagcttacaaagccgggcgtgctccaacgccggaagactttcctcgccaattggcgcttatgaaggaattagtggatttgcttggcctcgaacgcttggaagttcccggtttcgaggcagacgacgtattagcgactctcgcaaagaaagccgaacgtgagggctatgaagtccagatcttgacagcagatcgcgatcttttccagcttttatctccgcgcatctcggtgttacacccggaagggcatcgtatcaccccggaatggctctgggagaaatatggtttgcgtcccgaacaatgggtggattttcgcgccttagcaggcgatccgagcgacaatattccgggagttaaaggtatcggcgagaagacggcgctcaagctccttaaagaatgggggtcgttggagaacttgcttaagaatttagatcaggtcaaaccagagtcagtgcgtgagaagattcttgctcacctcgaagacctcaaattaagccgcgaattgtcccgtgtacgcaccgatttgccgctcgaagttgatttcggtcgccgccgcgaacctgactgggagggtcttaaagcgtttttagagcgtcttgaatttggttcgctcttgcatgaattcggccttttagaaagcccgttactggccgaagaagcaccttggccaccgcccgagggcgcgtttttaggttaccgtttgagttcgccggaaccgatgtgggccgaattactggctcttgcagcgtctgcccagggacgtgtgtatcgcgcggaagaccctcatggtgcgctccgcggcctcttcgaagtccgtggactccttgccaaagacttagctgttgttgcattgcgcgaaggtcttgatttacctccgactgatgatccaatgcttcttgcgtacctcttggacccgtcaaacacgacgcccgaaggcgtagcccgtcgttacggcggcgagtggaccgaagatgcagcgaaacgcgcgttattggccgaacgtttgcacgaaaatttattaggacgtttgcaaggcgaggaacgtctcctctggctttacgaagaagtggagaaaccattgagtcgcgtgctcgcgcatatggaagctaccggtgtcaaattagacgtggcgtatttggagaatctcagccttgaagttgctgcccacatgcgccgcttggaggaagaagtattccgtttagcaggccgttcctttcgccttaactctcgcgatcagttagaacgtgtgttgttcgatgaacttggtctccctcctatcggcaagacagagaagaccggtaaacgtagcacttcagcggcggttttagaagctcttcgcgaagtccatcccattgtggacaagatcttgcagtaccgcgaaatggcgaaattgaaaggcacctatattgaccgtcttccggcattagtccacccgaaaacgggacgcctccatacccgcttcaaccaaacagccacggcgaccggtcgtttgtcctcctctgatccaaaccttcagaatattccagtacgtaccccattgggccagaagatccgccgtgcgtttgtagctgaggagggttggcgtttagtggccctcgattatcgtcaaattgaattacgtgtccttgcccatctttctggcgatgagaacctcatccgcgtgtttcaggaaggcaaagacattcacactcaaacggcaagctggatgtttggattatcagctgaagcgatcgatcctttgatgcgtcgtgcagcgaagaccatcaatttcggtgttctctacggtatgagtgcctttcgtttgtcgcaggaattaggcattccctatgaagaagctcaggcgttcattcagaaatactttcaaagctatcccaaagttaaagcatggatcgagaagactctccgtgaaggccgcacacgtggttacgtagagaccttatttggacgtcgccgctatgttcccgatttaaacgctcgcgtgaaaggcaagcgtgaagccgccgaacgcatggcgttcaacatgcctgtacagggcacggcagctgacctcatgaaacttgcaatggtgcgcctttttccacaattgcgtgaagttggtgcccgcatgctcttgcaggtccacgatgaactcttgttagaagcgccaaaagagcgtgcggaagaggtggcagccctcgcgaaagaagttatggaaggcgtgtggcccttagcggtgcctcttgaagtcgaagttggtattggcgaggattggctggctgccaaagga

SEQ ID NO: 6364 - protein, 841 aa, synthetic construct
  REGION 1..841: note = Variant of DNA polymerase I from Thermus sp. strain 2.9
MHHHHHHGGSGVLPVFEPKGRVLLVDGHHLAYRNFFALKGLTTSLGEPVQGVYGFAKSLLKALKEDGDVVIVVFDAKAPSFRHEAYEAYKAGRAPTPEDFPRQLALMKELVDLLGLERLEVPGFEADDVLATLAKKAEREGYEVQILTADRDLFQLLSPRISVLHPEGHRITPEWLWEKYGLRPEQWVDFRALAGDPSDNIPGVKGIGEKTALKLLKEWGSLENLLKNLDQVKPESVREKILAHLEDLKLSRELSRVRTDLPLEVDFGRRREPDWEGLKAFLERLEFGSLLHEFGLLESPLLAEEAPWPPPEGAFLGYRLSSPEPMWAELLALAASAQGRVYRAEDPHGALRGLFEVRGLLAKDLAVVALREGLDLPPTDDPMLLAYLLDPSNTTPEGVARRYGGEWTEDAAKRALLAERLHENLLGRLQGEERLLWLYEEVEKPLSRVLAHMEATGVKLDVAYLENLSLEVAAHMRRLEEEVFRLAGRSFRLNSRDQLERVLFDELGLPPIGKTEKTGKRSTSAAVLEALREVHPIVDKILQYREMAKLKGTYIDRLPALVHPKTGRLHTRFNQTATATGRLSSSDPNLQNIPVRTPLGQKIRRAFVAEEGWRLVALDYRQIELRVLAHLSGDENLIRVFQEGKDIHTQTASWMFGLSAEAIDPLMRRAAKTINFGVLYGMSAFRLSQELGIPYEEAQAFIQKYFQSYPKVKAWIEKTLREGRTRGYVETLFGRRRYVPDLNARVKGKREAAERMAFNMPVQGTAADLMKLAMVRLFPQLREVGARMLLQVHDELLLEAPKERAEEVAALAKEVMEGVWPLAVPLEVEVGIGEDWLAAKG

SEQ ID NO: 6365 - DNA, 2523 bp, synthetic construct
  misc_feature 1..2523: note = Variant of DNA polymerase I from Thermus sp. strain 2.9
  source 1..2523: mol_type = other DNA
atgcaccatcatcatcatcatggcggtagcggcgtgttaccggtgttcgagcctaaaggtcgcgtgcttctggttgatggccatcatctcgcgtatcgtaacttctttgccctgaaaggattaaccaccagcctgggcgagccggtacagggtgtctacggctttgcaaagtcgctcctgaaagctctgaaagaagacggtgatgtggtgattgttgtctttgatgcgaaagcgccaagttttcgccacgaagcgtacgaagcttacaaagccgggcgtgctccaacgccggaagactttcctcgccaattggcgcttatgaaggaattagtggatttgcttggcctcgaacgcttggaagttcccggtttcgaggcagacgacgtattagcgactctcgcaaagaaagccgaacgtgagggctatgaagtccagatcttgacagcagatcgcgatcttttccagcttttatctccgcgcatctcggtgttacacccggaagggcatcgtatcaccccggaatggctctgggagaaatatggtttgcgtcccgaacaatgggtggattttcgcgccttagcaggcgatccgagcgacaatattccgggagttaaaggtatcggcgagaagacggcgctcaagctccttaaagaatgggggtcgttggagaacttgcttaagaatttagatcaggtcaaaccagagtcagtgcgtgagaagattcttgctcacctcgaagacctcaaattaagccgcgaattgtcccgtgtacgcaccgatttgccgctcgaagttgatttcggtcgccgccgcgaacctgactgggagggtcttaaagcgtttttagagcgtcttgaatttggttcgctcttgcatgaattcggccttttagaaagcccgttactggccgaagaagcaccttggccaccgcccgagggcgcgtttttaggttaccgtttgagtcgcccggaaccgatgtgggccgaattactggctcttgcagcgtctgcccagggacgtgtgtatcgcgcggaagaccctcatggtgcgctccgcggcctcttcgaagtccgtggactccttgccaaagacttagctgttgttgcattgcgcgaaggtcttgatttacctccgactgatgatccaatgcttcttgcgtacctcttggacccgtcaaacacgacgcccgaaggcgtagcccgtcgttacggcggcgagtggaccgaagatgcagcgaaacgcgcgttattggccgaacgtttgcacgaaaatttattaggacgtttgcaaggcgaggaacgtctcctctggctttacgaagaagtggagaaaccattgagtcgcgtgctcgcgcatatggaagctaccggtgtcaaattagacgtggcgtatttggagaatctcagccttgaagttgctgcccacatgcgccgcttggaggaagaagtattccgtttagcaggccgttcctttcgccttaactctcgcgatcagttagaacgtgtgttgttcgatgaacttggtctccctcctatcggcaagacagagttgaccggtaaacgtagcacttcagcggcggttttagaagctcttcgcgaagtccatcccattgtggacaagatcttgcagtaccgcgaaatggcgaaattgaaaggcacctatattgaccgtcttccggcattagtccacccgaaaacgggacgcctccatacccgcttcaaccaaacagccacggcgaccggtcgtttgtcctcctctgatccaaaccttcagaatattccagtacgtaccccattgggccagaagatccgccgtgcgtttgtagctgaggagggttggcgtttagtggccctcgattatcgtcaaattgaattacgtgtccttgcccatctttctggcgatgagaacctcatccgcgtgtttcaggaaggcaaagacattcacactcaaacggcaagctggatgtttggattatcagctgaagcgatcgatcctttgatgcgtcgtgcagcgaagaccatcaatttcggtgttctctacggtatgagtgcctttcgtttgtcgcaggaattaggcattccctatgaagaagctcaggcgttcattcagaaatactttcaaagctatcccaaagttaaagcatggatcgagaagactctccgtgaaggccgcacacgtggttacgtagagaccttatttggacgtcgccgctatgttcccgatttaaacgctcgcgtgaaaggcaagcgtgaagccgccgaacgcatggcgttcaacatgcctgtacagggcacggcagctgacctcatgaaacttgcaatggtgcgcctttttccacaattgcgtgaagttggtgcccgcatgctcttgcaggtccacgatgaactcttgttagaagcgccaaaagagcgtgcggaagaggtggcagccctcgcgaaagaagttatggaaggcgtgtggcccttagcggtgcctcttgaagtcgaagttggtattggcgaggattggctggctgccaaagga

SEQ ID NO: 6366 - protein, 841 aa, synthetic construct
  REGION 1..841: note = Variant of DNA polymerase I from Thermus sp. strain 2.9
MHHHHHHGGSGVLPVFEPKGRVLLVDGHHLAYRNFFALKGLTTSLGEPVQGVYGFAKSLLKALKEDGDVVIVVFDAKAPSFRHEAYEAYKAGRAPTPEDFPRQLALMKELVDLLGLERLEVPGFEADDVLATLAKKAEREGYEVQILTADRDLFQLLSPRISVLHPEGHRITPEWLWEKYGLRPEQWVDFRALAGDPSDNIPGVKGIGEKTALKLLKEWGSLENLLKNLDQVKPESVREKILAHLEDLKLSRELSRVRTDLPLEVDFGRRREPDWEGLKAFLERLEFGSLLHEFGLLESPLLAEEAPWPPPEGAFLGYRLSRPEPMWAELLALAASAQGRVYRAEDPHGALRGLFEVRGLLAKDLAVVALREGLDLPPTDDPMLLAYLLDPSNTTPEGVARRYGGEWTEDAAKRALLAERLHENLLGRLQGEERLLWLYEEVEKPLSRVLAHMEATGVKLDVAYLENLSLEVAAHMRRLEEEVFRLAGRSFRLNSRDQLERVLFDELGLPPIGKTELTGKRSTSAAVLEALREVHPIVDKILQYREMAKLKGTYIDRLPALVHPKTGRLHTRFNQTATATGRLSSSDPNLQNIPVRTPLGQKIRRAFVAEEGWRLVALDYRQIELRVLAHLSGDENLIRVFQEGKDIHTQTASWMFGLSAEAIDPLMRRAAKTINFGVLYGMSAFRLSQELGIPYEEAQAFIQKYFQSYPKVKAWIEKTLREGRTRGYVETLFGRRRYVPDLNARVKGKREAAERMAFNMPVQGTAADLMKLAMVRLFPQLREVGARMLLQVHDELLLEAPKERAEEVAALAKEVMEGVWPLAVPLEVEVGIGEDWLAAKG

SEQ ID NO: 6367 - DNA, 2523 bp, synthetic construct
  misc_feature 1..2523: note = Variant of DNA polymerase I from Thermus sp. strain 2.9
  source 1..2523: mol_type = other DNA
atgcaccatcatcatcatcatggcggtagcggcgtgttaccggtgttcgagcctaaaggtcgcgtgcttctggttgatggccatcatctcgcgtatcgtaacttctttgccctgaaaggattaaccaccagcctgggcgagccggtacagggtgtctacggctttgcaaagtcgctcctgaaagctctgaaagaagacggtgatgtggtgattgttgtctttgatgcgaaagcgccaagttttcgccacgaagcgtacgaagcttacaaagccgggcgtgctccaacgccggaagactttcctcgccaattggcgcttatgaaggaattagtggatttgcttggcctcgaacgcttggaagttcccggtttcgaggcagacgacgtattagcgactctcgcaaagaaagccgaacgtgagggctatgaagtccagatcttgacagcagatcgcgatcttttccagcttttatctccgcgcatctcggtgttacacccggaagggcatcgtatcaccccggaatggctctgggagaaatatggtttgcgtcccgaacaatgggtggattttcgcgccttagcaggcgatccgagcgacaatattccgggagttaaaggtatcggcgagaagacggcgctcaagctccttaaagaatgggggtcgttggagaacttgcttaagaatttagatcaggtcaaaccagagtcagtgcgtgagaagattcttgctcacctcgaagacctcaaattaagccgcgaattgtcccgtgtacgcaccgatttgccgctcgaagttgatttcggtcgccgccgcgaacctgactgggagggtcttaaagcgtttttagagcgtcttgaatttggttcgctcttgcatgaattcggccttttagaaagcccgttactggccgaagaagcaccttggccaccgcccgagggcgcgtttttaggttaccgtttgagtcgcccggaaccgatgtgggccgaattactggctcttgcagcgtctgcccagggacgtgtgtatcgcgcggaagaccctcatggtgcgctccgcggcctcttcgaagtccgtggcctccttgccaaagacttagctgttgttgcattgcgcgaaggtcttgatttacctccgactgatgatccaatgcttcttgcgtacctcttggacccgtcaaacacgacgcccgaaggcgtagcccgtcgttacggcggcgagtggtgggaagatgcaggcaaacgcgcgttattggccgaacgtttgcacgaaaatttattaggacgtttgcaaggcgaggaacgtctcctctggctttacgaagaagtggagaaaccattgagtcgcgtgctcgcgcatatggaagctaccggtgtcaaattagacgtggcgtatttggagaatctcagccttgaagttgctgcccacatgcgccgcttggaggaagaagtattccgtttagcaggccgttcctttcgccttaactctcgcgatcagttagaacgtgtgttgttcgatgaacttggtctccctcctatcggcaagacagagaagaccggtaaacgtagcacttcagcggcggttttagaagctcttcgcgaagtccatcccattgtggacaagatcttgcagtaccgcgaaatggcgaaattgaaaggcacctatattgaccgtcttccggcattagtccacccgaaaacgggacgcctccatacccgcttcaaccaaacagccacggcgaccggtcgtttgtcctcctctgatccaaaccttcagaatattccagtacgtacctttttgggccagaagatccgccgtgcgtttgtagctgagccgggttgggcgttagtggccctcgattatcgtcaaattgaattacgtgtccttgcccatctttctggcgatgagaacctcatccgcgtgtttcaggaaggcaaagacattcacactcaaacggcaagctggatgtttggattatcagctgaagcgatcgatcctttgatgcgtcgtgcagcgaagaccatcaatttcggtgttctctacggtatgagtgcctttcgtttgtcgcaggaattaggcattccctatgaagaagctcaggcgttcattcagaaatactttcaaggctatcccaaagttaaagcatggatcgagaagactctccgtgaaggccgcacacgtggttacgtagagaccttatttggacgtcgccgctatgttcccgatttaaacgctcgcgtgaaaggcaagcgtgaagccgccgaacgcatggcgttcaacatgcctgtacagggcacggcagctgacctcatgaaacttgcaatggtgcgcctttttccacaattgcgtgaagttggtgcccgcatgctcttgcaggtccacgatgaactcttgttagaagcgccaaaagagcgtgcggaagaggtggcagccctcgcgaaagaagttatggaaggcgtgtggcccttagcggtgcctcttgaagtcgaagttggtattggcgaggattggctggctgccaaagga

SEQ ID NO: 6368 - protein, 841 aa, synthetic construct
  REGION 1..841: note = Variant of DNA polymerase I from Thermus sp. strain 2.9
MHHHHHHGGSGVLPVFEPKGRVLLVDGHHLAYRNFFALKGLTTSLGEPVQGVYGFAKSLLKALKEDGDVVIVVFDAKAPSFRHEAYEAYKAGRAPTPEDFPRQLALMKELVDLLGLERLEVPGFEADDVLATLAKKAEREGYEVQILTADRDLFQLLSPRISVLHPEGHRITPEWLWEKYGLRPEQWVDFRALAGDPSDNIPGVKGIGEKTALKLLKEWGSLENLLKNLDQVKPESVREKILAHLEDLKLSRELSRVRTDLPLEVDFGRRREPDWEGLKAFLERLEFGSLLHEFGLLESPLLAEEAPWPPPEGAFLGYRLSRPEPMWAELLALAASAQGRVYRAEDPHGALRGLFEVRGLLAKDLAVVALREGLDLPPTDDPMLLAYLLDPSNTTPEGVARRYGGEWWEDAGKRALLAERLHENLLGRLQGEERLLWLYEEVEKPLSRVLAHMEATGVKLDVAYLENLSLEVAAHMRRLEEEVFRLAGRSFRLNSRDQLERVLFDELGLPPIGKTEKTGKRSTSAAVLEALREVHPIVDKILQYREMAKLKGTYIDRLPALVHPKTGRLHTRFNQTATATGRLSSSDPNLQNIPVRTFLGQKIRRAFVAEPGWALVALDYRQIELRVLAHLSGDENLIRVFQEGKDIHTQTASWMFGLSAEAIDPLMRRAAKTINFGVLYGMSAFRLSQELGIPYEEAQAFIQKYFQGYPKVKAWIEKTLREGRTRGYVETLFGRRRYVPDLNARVKGKREAAERMAFNMPVQGTAADLMKLAMVRLFPQLREVGARMLLQVHDELLLEAPKERAEEVAALAKEVMEGVWPLAVPLEVEVGIGEDWLAAKG

SEQ ID NO: 6369 - DNA, 2523 bp, synthetic construct
  misc_feature 1..2523: note = Variant of DNA polymerase I from Thermus sp. strain 2.9
  source 1..2523: mol_type = other DNA
atgcaccatcatcatcatcatggcggtagcggcgtgttaccggtgttcgagcctaaaggtcgcgtgcttctggttgatggccatcatctcgcgtatcgtaacttctttgccctgaaaggattaaccaccagcctgggcgagccggtacagggtgtctacggctttgcaaagtcgctcctgaaagctctgaaagaagacggtgatgtggtgattgttgtctttgatgcgaaagcgccaagttttcgccacgaagcgtacgaagcttacaaagccgggcgtgctccaacgccggaagactttcctcgccaattggcgcttatgaaggaattagtggatttgcttggcctcgaacgcttggaagttcccggtttcgaggcagacgacgtattagcgactctcgcaaagaaagccgaacgtgagggctatgaagtccagatcttgacagcagatcgcgatcttttccagcttttatctccgcgcatctcggtgttacacccggaagggcatcgtatcaccccggaatggctctgggagaaatatggtttgcgtcccgaacaatgggtggattttcgcgccttagcaggcgatccgagcgacaatattccgggagttaaaggtatcggcgagaagacggcgctcaagctccttaaagaatgggggtcgttggagaacttgcttaagaatttagatcaggtcaaaccagagtcagtgcgtgagaagattcttgctcacctcgaagacctcaaattaagccgcgaattgtcccgtgtacgcaccgatttgccgctcgaagttgatttcggccgccgccgcgaacctgactgggagggtcttaaagcgtttttagagcgtcttgaatttggttcgctcttgcatgaattcggccttttagaaagcccgttactggccgaagaagcaccttggccaccgcccgagggcgcgtttttaggttaccgtttgagtcgcccggaaccgatgtgggccgaattactggctcttgcagcgtctgcccagggacgtgtgtatcgcgcggaagaccctcatggtgcgctccgcggcctcttcgaagtccgtggactccttgccaaagacttagctgttgttgcattgcgcgaaggtcttgatttacctccgactgatgatccaatgcttcttgcgtacctcttggacccgtcaaacacgacgcccgaaggcgtagcccgtcgttacggcggcgagtggaccgaagatgcagcgaaacgcgcgttattggccgaacgtttgcacgaaaatttattaggacgtttgcaaggcgaggaacgtctcctctggctttacgaagaagtggagaaaccattgagtcgcgtgctcgcgcatatggaagctaccggtgtcaaattagacgtggcgtatttggagaatctcagccttgaagttgctgcccatatgcgccgcttggaggaagaagtattccgtttagcaggccgttcctttcgccttaactctcgcgatcagttagaacgtgtgttgttcgatgaacttggtctccctcctatcggcaagacagagaagaccggtaaacgtagcacttcagcggcggttttagaagctcttcgcgaagtccatcccattgtggacaagatcttgcagtaccgcgaaatggcgaaattgaaaggcacctatattgaccgtcttccggcattagtccacccgaaaacgggacgcctccatacccgcttcaaccaaacagccacggcgaccggtcgtttgtccagttctgatccaaaccttcagaatattccagtacgtaccccattgggccagaagatccgccgtgcgtttgtagctgaggagggttggcgtttagtggccctcgattatcgtcaaattgaattacgtgtccttgcccatctttctggcgatgagaacctcatccgcgtgtttcaggaaggcaaagacattcacactcaaacggcaagctggatgtttggattatcagctgaagcgatcgatcctttgatgcgtcgtgcagcgaagaccatcaatttcggtgttctctacggtatgagtgcctttcgtttgtcgcaggaattaggcattccctatgaagaagctcaggcgttcattcagaaatactttcaaagctatcccaaagttaaagcatggatcgagaagactctcgaggaaggccgcacacgtggttacgtagagaccttatttggacgtcgccgctatgttcccgatttaaacgctcgcgtgaaaggcgtacgtgaagccgccgaacgcatggcgttcaacatgcctgtacagggcacggcagctgacctcatgaaacttgcaatggtgcgcctttttccacaattgcgtgaagttggtgcccgcatgctcttgcaggtccacgatgaactcttgttagaagcgccaaaagagcgtgcggaagaggtggcagccctcgcgaaagaagttatggaaggcgtgtggcccttagcggtgcctcttgaagtcgaagttggtattggcgaggattggctggctgccaaagga

SEQ ID NO: 6370 - protein, 841 aa, synthetic construct
  REGION 1..841: note = Variant of DNA polymerase I from Thermus sp. strain 2.9
MHHHHHHGGSGVLPVFEPKGRVLLVDGHHLAYRNFFALKGLTTSLGEPVQGVYGFAKSLLKALKEDGDVVIVVFDAKAPSFRHEAYEAYKAGRAPTPEDFPRQLALMKELVDLLGLERLEVPGFEADDVLATLAKKAEREGYEVQILTADRDLFQLLSPRISVLHPEGHRITPEWLWEKYGLRPEQWVDFRALAGDPSDNIPGVKGIGEKTALKLLKEWGSLENLLKNLDQVKPESVREKILAHLEDLKLSRELSRVRTDLPLEVDFGRRREPDWEGLKAFLERLEFGSLLHEFGLLESPLLAEEAPWPPPEGAFLGYRLSRPEPMWAELLALAASAQGRVYRAEDPHGALRGLFEVRGLLAKDLAVVALREGLDLPPTDDPMLLAYLLDPSNTTPEGVARRYGGEWTEDAAKRALLAERLHENLLGRLQGEERLLWLYEEVEKPLSRVLAHMEATGVKLDVAYLENLSLEVAAHMRRLEEEVFRLAGRSFRLNSRDQLERVLFDELGLPPIGKTEKTGKRSTSAAVLEALREVHPIVDKILQYREMAKLKGTYIDRLPALVHPKTGRLHTRFNQTATATGRLSSSDPNLQNIPVRTPLGQKIRRAFVAEEGWRLVALDYRQIELRVLAHLSGDENLIRVFQEGKDIHTQTASWMFGLSAEAIDPLMRRAAKTINFGVLYGMSAFRLSQELGIPYEEAQAFIQKYFQSYPKVKAWIEKTLEEGRTRGYVETLFGRRRYVPDLNARVKGVREAAERMAFNMPVQGTAADLMKLAMVRLFPQLREVGARMLLQVHDELLLEAPKERAEEVAALAKEVMEGVWPLAVPLEVEVGIGEDWLAAKG

SEQ ID NO: 6371 - DNA, 2523 bp, synthetic construct
  misc_feature 1..2523: note = Variant of DNA polymerase I from Thermus sp. strain 2.9
  source 1..2523: mol_type = other DNA
atgcaccatcatcatcatcatggcggtagcggcgtgttaccggtgttcgagcctaaaggtcgcgtgcttctggttgatggccatcatctcgcgtatcgtaacttctttgccctgaaaggattaaccaccagcctgggcgagccggtacagggtgtctacggctttgcaaagtcgctcctgaaagctctgaaagaagacggtgatgtggtgattgttgtctttgatgcgaaagcgccaagttttcgccacgaagcgtacgaagcttacaaagccgggcgtgctccaacgccggaagactttcctcgccaattggcgcttatgaaggaattagtggatttgcttggcctcgaacgcttggaagttcccggtttcgaggcagacgacgtattagcgactctcgcaaagaaagccgaacgtgagggctatgaagtccagatcttgacagcagatcgcgatcttttccagcttttatctccgcgcatctcggtgttacacccggaagggcatcgtatcaccccggaatggctctgggagaaatatggtttgcgtcccgaacaatgggtggattttcgcgccttagcaggcgatccgagcgacaatattccgggagttaaaggtatcggcgagaagacggcgctcaagctccttaaagaatgggggtcgttggagaacttgcttaagaatttagatcaggtcaaaccagagtcagtgcgtgagaagattcttgctcacctcgaagacctcaaattaagccgcgaattgtcccgtgtacgcaccgatttgccgctcgaagttgatttcggtcgccgccgcgaacctgactgggagggtcttaaagcgtttttagagcgtcttgaatttggttcgctcttgcatgaattcggccttttagaaagcccgttactggccgaagaagcaccttggccaccgcccgagggcgcgtttttaggttaccgtttgagtcgcccggaaccgatgtgggccgaattactggctcttgcagcgtctgcccagggacgtgtgtatcgcgcggaagaccctcatggtgcgctccgcggcctcttcgaagtccgtggactccttgccaaagacttagctgttgttgcattgcgcgaaggtcttgatttacctccgactgatgatccaatgcttcttgcgtacctcttggacccgtcaaacacgacgcccgaaggcgtagcccgtcgttacggcggcgagtggaccgaagatgcagcgaaacgcgcgttattggccgaacgtttgcacgaaaatttattaggacgtttgcaaggcgaggaacgtctcctctggctttacgaagaagtggagaaaccattgagtcgcgtgctcgcgcatatggaagctaccggtgtcaaattagacgtggcgtatttggagaatctcagccttgaagttgctgcccacatgcgccgcttggaggaagaatgtttccgtttagcaggccgttcctttcgccttaactctcgcgatcagttagaacgtgtgttgttcgatgaacttggtctccctcctatcggcaagacagagaagaccggtaaacgtagcacttcagcggcggttttagaagctcttcgcgaagtccatcccattgtggacaagatcttgcagtaccgcgaaatggcgaaattgaaaggcacctatattgaccgtcttccggcattagtccacccgaaaacgggacgcctccatacccgcttcaaccaaacagccacggcgaccggtcgtttgtcctcctctgatccaaaccttcagaatattccagtacgtaccccattgggccagaagatccgccgtgcgtttgtagctgaggagggttggcgtttagtggccctcgattatcgtcaaattgaattacgtgtccttgcccatctttctggcgatgagaacctcatccgcgtgtttcaggaaggcaaagacattcacactcaaacggcaagctggatgtttggattatcagctgaagcgatcgatcctttgatgcgtcgtgcagcgaagaccatcaatttcggtgttctctacggtatgagtgcctttcgtttgtcgcaggaattaggcattccctatgaagaagctcaggcgttcattcagaaatactttcaaagctatcccaaagttaaagcatggatcgagaagactctccgtgaaggccgcacacgtggttacgtagagaccttatttggacgtcgccgctatgttcccgatttaaacgctcgcgtgaaaggcaagcgtgaagccgccgaacgcatggcgttcaacatgcctgtacagggcacggcagctgacctcatgaaacttgcaatggtgcgcctttttccacaattgcgtgaagttggtgcccgcatgctcttgcaggtccacgatgaactcttgttagaagcgccaaaagagcgtgcggaagaggtggcagccctcgcgaaagaagttatggaaggcgtgtggcccttagcggtgcctcttgaagtcgaagttggtattggcgaggattggctggctgccaaagga

SEQ ID NO: 6372 - protein, 841 aa, synthetic construct
  REGION 1..841: note = Variant of DNA polymerase I from Thermus sp. strain 2.9
MHHHHHHGGSGVLPVFEPKGRVLLVDGHHLAYRNFFALKGLTTSLGEPVQGVYGFAKSLLKALKEDGDVVIVVFDAKAPSFRHEAYEAYKAGRAPTPEDFPRQLALMKELVDLLGLERLEVPGFEADDVLATLAKKAEREGYEVQILTADRDLFQLLSPRISVLHPEGHRITPEWLWEKYGLRPEQWVDFRALAGDPSDNIPGVKGIGEKTALKLLKEWGSLENLLKNLDQVKPESVREKILAHLEDLKLSRELSRVRTDLPLEVDFGRRREPDWEGLKAFLERLEFGSLLHEFGLLESPLLAEEAPWPPPEGAFLGYRLSRPEPMWAELLALAASAQGRVYRAEDPHGALRGLFEVRGLLAKDLAVVALREGLDLPPTDDPMLLAYLLDPSNTTPEGVARRYGGEWTEDAAKRALLAERLHENLLGRLQGEERLLWLYEEVEKPLSRVLAHMEATGVKLDVAYLENLSLEVAAHMRRLEEECFRLAGRSFRLNSRDQLERVLFDELGLPPIGKTEKTGKRSTSAAVLEALREVHPIVDKILQYREMAKLKGTYIDRLPALVHPKTGRLHTRFNQTATATGRLSSSDPNLQNIPVRTPLGQKIRRAFVAEEGWRLVALDYRQIELRVLAHLSGDENLIRVFQEGKDIHTQTASWMFGLSAEAIDPLMRRAAKTINFGVLYGMSAFRLSQELGIPYEEAQAFIQKYFQSYPKVKAWIEKTLREGRTRGYVETLFGRRRYVPDLNARVKGKREAAERMAFNMPVQGTAADLMKLAMVRLFPQLREVGARMLLQVHDELLLEAPKERAEEVAALAKEVMEGVWPLAVPLEVEVGIGEDWLAAKG

SEQ ID NO: 6373 - DNA, 2523 bp, synthetic construct
  misc_feature 1..2523: note = Variant of DNA polymerase I from Thermus sp. strain 2.9
  source 1..2523: mol_type = other DNA
atgcaccatcatcatcatcatggcggtagcggcgtgttaccggtgttcgagcctaaaggtcgcgtgcttctggttgatggccatcatctcgcgtatcgtaacttctttgccctgaaaggattaaccaccagcctgggcgagccggtacagggtgtctacggctttgcaaagtcgctcctgaaagctctgaaagaagacggtgatgtggtgattgttgtctttgatgcgaaagcgccaagttttcgccacgaagcgtacgaagcttacaaagccgggcgtgctccaacgccggaagactttcctcgccaattggcgcttatgaaggaattagtggatttgcttggcctcgaacgcttggaagttcccggtttcgaggcagacgacgtattagcgactctcgcaaagaaagccgaacgtgagggctatgaagtccagatcttgacagcagatcgcgatcttttccagcttttatctccgcgcatctcggtgttacacccggaagggcatcgtatcaccccggaatggctctgggagaaatatggtttgcgtcccgaacaatgggtggattttcgcgccttagcaggcgatccgagcgacaatattccgggagttaaaggtatcggcgagaagacggcgctcaagctccttaaagaatgggggtcgttggagaacttgcttaagaatttagatcaggtcaaaccagagtcagtgcgtgagaagattcttgctcacctcgaagacctcaaattaagccgcgaattgtcccgtgtacgcaccgatttgccgctcgaagttgatttcggtcgccgccgcgaacctgactgggagggtcttaaagcgtttttagagcgtcttgaatttggttcgctcttgcatgaattcggccttttagaaagcccgttactggccgaagaagcaccttggccaccgcccgagggcgcgtttttaggttaccgtttgagtcgcccggaaccgatgtgggccgaattactggctcttgcagcgtctgcccagggacgtgtgtatcgcgcggaagaccctcatggtgcgctccgcggcctcttcgaagtccgtggactccttgccaaagacttagctgttgttgcattgcgcgaaggtcttgatttacctccgactgatgatccaatgcttcttgcgtacctcttggacccgtcaaacacgacgcccgaaggcgtagcccgtcgttacggcggcgagtggaccgaagatgcagcgaaacgcgcgttattggccgaacgtttgcacgaaaatttattaggacgtttgcaaggcgaggaacgtctcctctggctttacgaagaagtggagaaaccattgagtcgcgtgctcgcgcatatggaagctaccggtgtcaaattagacgtggcgtatttggagaatctcagccttgaagttgctgcccacatgcgccgcttggaggaagaagtattccgtttagcaggccgttcctttcgccttaactctcgcgatcagttagaacgtgtgttgttcgatgaacttggtctccctcctatcggcaagacagagaagaccggtaaacgtagcacttcagcggcggttttagaagctcttcgcgaagtccatcccattgtggacaagatcttgcagtaccgcgaaatggcgaaattgaaaggcacctatattgaccgtcttccggcattagtccacccgaaaacgggacgcctccatacccgcttcaaccaaacagccacggcgaccggtcgtttgtcctcctctgatccaaaccttcagaatattccagtacgtaccccattgggccagaagatccgccgtgcgtttgtagctgaggagggttggcgtttagtggccctcgattatcgtcaaattgaattacgtgtccttgcccatctttctggcgatgagaacctcatccgcgtgtttcaggaaggcaaagacattcacactcaaacggcaagctggatgtttggattatcagctgaagcgatcgatcctttgatgcgtcgtgcagcgaagaccatcaatttcggtgttctctacggtatgagtgcctttcgtttgtcgcaggaagggggcattccctatgaagaagctcaggcgttcattcagaaatactttcaaagctatcccaaagttaaagcatggatcgagaagactctccgtgaaggccgcacacgtggttacgtagagaccttatttggacgtcgccgctatgttcccgatttaaacgctcgcgtgaaaggcaagcgtgaagccgccgaacgcatggcgttcaacatgcctgtacagggcacggcagctgacctcatgaaacttgcaatggtgcgcctttttccacaattgcgtgaagttggtgcccgcatgctcttgcaggtccacgatgaactcttgttagaagcgccaaaagagcgtgcggaagaggtggcagccctcgcgaaagaagttatggaaggcgtgtggcccttagcggtgcctcttgaagtcgaagttggtattggcgaggattggctggctgccaaagga

SEQ ID NO: 6374 - protein, 841 aa, synthetic construct
  REGION 1..841: note = Variant of DNA polymerase I from Thermus sp. strain 2.9
MHHHHHHGGSGVLPVFEPKGRVLLVDGHHLAYRNFFALKGLTTSLGEPVQGVYGFAKSLLKALKEDGDVVIVVFDAKAPSFRHEAYEAYKAGRAPTPEDFPRQLALMKELVDLLGLERLEVPGFEADDVLATLAKKAEREGYEVQILTADRDLFQLLSPRISVLHPEGHRITPEWLWEKYGLRPEQWVDFRALAGDPSDNIPGVKGIGEKTALKLLKEWGSLENLLKNLDQVKPESVREKILAHLEDLKLSRELSRVRTDLPLEVDFGRRREPDWEGLKAFLERLEFGSLLHEFGLLESPLLAEEAPWPPPEGAFLGYRLSRPEPMWAELLALAASAQGRVYRAEDPHGALRGLFEVRGLLAKDLAVVALREGLDLPPTDDPMLLAYLLDPSNTTPEGVARRYGGEWTEDAAKRALLAERLHENLLGRLQGEERLLWLYEEVEKPLSRVLAHMEATGVKLDVAYLENLSLEVAAHMRRLEEEVFRLAGRSFRLNSRDQLERVLFDELGLPPIGKTEKTGKRSTSAAVLEALREVHPIVDKILQYREMAKLKGTYIDRLPALVHPKTGRLHTRFNQTATATGRLSSSDPNLQNIPVRTPLGQKIRRAFVAEEGWRLVALDYRQIELRVLAHLSGDENLIRVFQEGKDIHTQTASWMFGLSAEAIDPLMRRAAKTINFGVLYGMSAFRLSQEGGIPYEEAQAFIQKYFQSYPKVKAWIEKTLREGRTRGYVETLFGRRRYVPDLNARVKGKREAAERMAFNMPVQGTAADLMKLAMVRLFPQLREVGARMLLQVHDELLLEAPKERAEEVAALAKEVMEGVWPLAVPLEVEVGIGEDWLAAKG

SEQ ID NO: 6375 - DNA, 2523 bp, synthetic construct
  misc_feature 1..2523: note = Variant of DNA polymerase I from Thermus sp. strain 2.9
  source 1..2523: mol_type = other DNA
atgcaccatcatcatcatcatggcggtagcggcgtgttaccggtgttcgagcctaaaggtcgcgtgcttctggttgatggccatcatctcgcgtatcgtaacttctttgccctgaaaggattaaccaccagcctgggcgagccggtacagggtgtctacggctttgcaaagtcgctcctgaaagctctgaaagaagacggtgatgtggtgattgttgtctttgatgcgaaagcgccaagttttcgccacgaagcgtacgaagcttacaaagccgggcgtgctccaacgccggaagactttcctcgccaattggcgcttatgaaggaattagtggatttgcttggcctcgaacgcttggaagttcccggtttcgaggcagacgacgtattagcgactctcgcaaagaaagccgaacgtgagggctatgaagtccagatcttgacagcagatcgcgatcttttccagcttttatctccgcgcatctcggtgttacacccggaagggcatcgtatcaccccggaatggctctgggagaaatatggtttgcgtcccgaacaatgggtggattttcgcgccttagcaggcgatccgagcgacaatattccgggagttaaaggtatcggcgagaagacggcgctcaagctccttaaagaatgggggtcgttggagaacttgcttaagaatttagatcaggtcaaaccagagtcagtgcgtgagaagattcttgctcacctcgaagacctcaaattaagccgcgaattgtcccgtgtacgcaccgatttgccgctcgaagttgatttcggtcgccgccgcgaacctgactgggagggtcttaaagcgtttttagagcgtcttgaatttggttcgctcttgcatgaattcggccttttagaaagcccgttactggccgaagaagcaccttggccaccgcccgagggcgcgtttttaggttaccgtttgagtcgcccggaaccgatgtgggccgaattactggctcttgcagcgtctgcccagggacgtgtgtatcgcgcggaagaccctcatggtgcgctccgcggcctcttcgaagtccgtggactccttgccaaagacttagctgttgttgcattgcgcgaaggtcttgatttacctccgactgatgatccaatgcttcttgcgtacctcttggacccgtcaaacacgacgcccgaaggcgtagcccgtcgttacggcggcgagtggaccgaagatgcagcgaaacgcgcgttattggccgaacgtttgcacgaaaatttattaggacgtttgcaaggcgaggaacgtctcctctggctttacgaagaagtggagaaaccattgagtcgcgtgctcgcgcatatggaagctaccggtgtcaaattagacgtggcgtatttggagaatctcagccttgaagttgctgcccacatgcgccgcttggaggaagaatctttccgtttagcaggccgttcctttcgccttaactctcgcgatcagttagaacgtgtgttgttcgatgaacttggtctccctcctatcggcaagacagagaagaccggtaaacgtagcacttcagcggcggttttagaagctcttcgcgaagtccatcccattgtggacaagatcttgcagtaccgcgaaatggcgaaattgaaaggcacctatattgaccgtcttccggcattagtccacccgaaaacgggacgcctccatacccgcttcaaccaaacagccacggcgaccggtcgtttgtcctcctctgatccaaaccttcagaatattccagtacgtaccccattgggccagaagatccgccgtgcgtttgtagctgaggagggttggcgtttagtggccctcgattatcgtcaaattgaattacgtgtccttgcccatctttctggcgatgagaacctcatccgcgtgtttcaggaaggcaaagacattcacactcaaacggcaagctggatgtttggattatcagctgaagcgatcgatcctttgatgcgtcgtgcagcgaagaccatcaatttcggtgttctctacggtatgagtgcctttcgtttgtcgcaggaattaggcattccctatgaagaagctcaggcgttcattcagaaatactttcaaagctatcccaaagttaaagcatggatcgagaagactctccgtgaaggccgcacacgtggttacgtagagaccttatttggacgtcgccgctatgttcccgatttaaacgctcgcgtgaaaggcaagcgtgaagccgccgaacgcatggcgttcaacatgcctgtacagggcacggcagctgacctcatgaaacttgcaatggtgcgcctttttccacaattgcgtgaagttggtgcccgcatgctcttgcaggtccacgatgaactcttgttagaagcgccaaaagagcgtgcggaagaggtggcagccctcgcgaaagaagttatggaaggcgtgtggcccttagcggtgcctcttgaagtcgaagttggtattggcgaggattggctggctgccaaagga

SEQ ID NO: 6376 - protein, 841 aa, synthetic construct
  REGION 1..841: note = Variant of DNA polymerase I from Thermus sp. strain 2.9
MHHHHHHGGSGVLPVFEPKGRVLLVDGHHLAYRNFFALKGLTTSLGEPVQGVYGFAKSLLKALKEDGDVVIVVFDAKAPSFRHEAYEAYKAGRAPTPEDFPRQLALMKELVDLLGLERLEVPGFEADDVLATLAKKAEREGYEVQILTADRDLFQLLSPRISVLHPEGHRITPEWLWEKYGLRPEQWVDFRALAGDPSDNIPGVKGIGEKTALKLLKEWGSLENLLKNLDQVKPESVREKILAHLEDLKLSRELSRVRTDLPLEVDFGRRREPDWEGLKAFLERLEFGSLLHEFGLLESPLLAEEAPWPPPEGAFLGYRLSRPEPMWAELLALAASAQGRVYRAEDPHGALRGLFEVRGLLAKDLAVVALREGLDLPPTDDPMLLAYLLDPSNTTPEGVARRYGGEWTEDAAKRALLAERLHENLLGRLQGEERLLWLYEEVEKPLSRVLAHMEATGVKLDVAYLENLSLEVAAHMRRLEEESFRLAGRSFRLNSRDQLERVLFDELGLPPIGKTEKTGKRSTSAAVLEALREVHPIVDKILQYREMAKLKGTYIDRLPALVHPKTGRLHTRFNQTATATGRLSSSDPNLQNIPVRTPLGQKIRRAFVAEEGWRLVALDYRQIELRVLAHLSGDENLIRVFQEGKDIHTQTASWMFGLSAEAIDPLMRRAAKTINFGVLYGMSAFRLSQELGIPYEEAQAFIQKYFQSYPKVKAWIEKTLREGRTRGYVETLFGRRRYVPDLNARVKGKREAAERMAFNMPVQGTAADLMKLAMVRLFPQLREVGARMLLQVHDELLLEAPKERAEEVAALAKEVMEGVWPLAVPLEVEVGIGEDWLAAKG

SEQ ID NO: 6377 - DNA, 2523 bp, synthetic construct
  misc_feature 1..2523: note = Variant of DNA polymerase I from Thermus sp. strain 2.9
  source 1..2523: mol_type = other DNA
atgcaccatcatcatcatcatggcggtagcggcgtgttaccggtgttcgagcctaaaggtcgcgtgcttctggttgatggccatcatctcgcgtatcgtaacttctttgccctgaaaggattaaccaccagcctgggcgagccggtacagggtgtctacggctttgcaaagtcgctcctgaaagctctgaaagaagacggtgatgtggtgattgttgtctttgatgcgaaagcgccaagttttcgccacgaagcgtacgaagcttacaaagccgggcgtgctccaacgccggaagactttcctcgccaattggcgcttatgaaggaattagtggatttgcttggcctcgaacgcttggaagttcccggtttcgaggcagacgacgtattagcgactctcgcaaagaaagccgaacgtgagggctatgaagtccagatcttgacagcagatcgcgatcttttccagcttttatctccgcgcatctcggtgttacacccggaagggcatcgtatcaccccggaatggctctgggagaaatatggtttgcgtcccgaacaatgggtggattttcgcgccttagcaggcgatccgagcgacaatattccgggagttaaaggtatcggcgagaagacggcgctcaagctccttaaagaatgggggtcgttggagaacttgcttaagaatttagatcaggtcaaaccagagtcagtgcgtgagaagattcttgctcacctcgaagacctcaaattaagccgcgaattgtcccgtgtacgcaccgatttgccgctcgaagttgatttcggtcgccgccgcgaacctgactgggagggtcttaaagcgtttttagagcgtcttgaatttggttcgctcttgcatgaattcggccttttagaaagcccgttactggccgaagaagcaccttggccaccgcccgagggcgcgtttttaggttaccgtttgagtcgcccggaaccgatgtgggccgaattactggctcttgcagcgtctgcccagggacgtgtgtatcgcgcggaagaccctcatggtgcgctccgcggcctcttcgaagtccgtggactccttgccaaagacttagctgttgttgcattgcgcgaaggtcttgatttacctccgactgatgatccaatgcttcttgcgtacctcttggacccgtcaaacacgacgcccgaaggcgtagcccgtcgttacggcggcgagtggaccgaagatgcagcgaaacgcgcgttattggccgaacgtttgcacgaaaatttattaggacgtttgcaaggcgaggaacgtctcctctggctttacgaagaagtggagaaaccattgagtcgcgtgctcgcgcatatggaagctaccggtgtcaaattagacgtggcgtatttggagaatctcagccttgaagttgctgcccacatgcgccgcttggaggaagaagtattccgtttagcaggccgttcctttcgccttaactctcgcgatcagttagaacgtgtgttgttcgatatgcttggtctccctcctatcggcaagacagagaagaccggtaaacgtagcacttcagcggcggttttagaagctcttcgcgaagtccatcccattgtggacaagatcttgcagtaccgcgaaatggcgaaattgaaaggcacctatattgaccgtcttccggcattagtccacccgaaaacgggacgcctccatacccgcttcaaccaaacagccacggcgaccggtcgtttgtcctcctctgatccaaaccttcagaatattccagtacgtaccccattgggccagaagatccgccgtgcgtttgtagctgaggagggttggcgtttagtggccctcgattatcgtcaaattgaattacgtgtccttgcccatctttctggcgatgagaacctcatccgcgtgtttcaggaaggcaaagacattcacactcaaacggcaagctggatgtttggattatcagctgaagcgatcgatcctttgatgcgtcgtgcagcgaagaccatcaatttcggtgttctctacggtatgagtgcctttcgtttgtcgcaggaattaggcattccctatgaagaagctcaggcgttcattcagaaatactttcaaagctatcccaaagttaaagcatggatcgagaagactctccgtgaaggccgcacacgtggttacgtagagaccttatttggacgtcgccgctatgttcccgatttaaacgctcgcgtgaaaggcaagcgtgaagccgccgaacgcatggcgttcaacatgcctgtacagggcacggcagctgacctcatgaaacttgcaatggtgcgcctttttccacaattgcgtgaagttggtgcccgcatgctcttgcaggtccacgatgaactcttgttagaagcgccaaaagagcgtgcggaagaggtggcagccctcgcgaaagaagttatggaaggcgtgtggcccttagcggtgcctcttgaagtcgaagttggtattggcgaggattggctggctgccaaagga

SEQ ID NO: 6378 - protein, 841 aa, synthetic construct
  REGION 1..841: note = Variant of DNA polymerase I from Thermus sp. strain 2.9
MHHHHHHGGSGVLPVFEPKGRVLLVDGHHLAYRNFFALKGLTTSLGEPVQGVYGFAKSLLKALKEDGDVVIVVFDAKAPSFRHEAYEAYKAGRAPTPEDFPRQLALMKELVDLLGLERLEVPGFEADDVLATLAKKAEREGYEVQILTADRDLFQLLSPRISVLHPEGHRITPEWLWEKYGLRPEQWVDFRALAGDPSDNIPGVKGIGEKTALKLLKEWGSLENLLKNLDQVKPESVREKILAHLEDLKLSRELSRVRTDLPLEVDFGRRREPDWEGLKAFLERLEFGSLLHEFGLLESPLLAEEAPWPPPEGAFLGYRLSRPEPMWAELLALAASAQGRVYRAEDPHGALRGLFEVRGLLAKDLAVVALREGLDLPPTDDPMLLAYLLDPSNTTPEGVARRYGGEWTEDAAKRALLAERLHENLLGRLQGEERLLWLYEEVEKPLSRVLAHMEATGVKLDVAYLENLSLEVAAHMRRLEEEVFRLAGRSFRLNSRDQLERVLFDMLGLPPIGKTEKTGKRSTSAAVLEALREVHPIVDKILQYREMAKLKGTYIDRLPALVHPKTGRLHTRFNQTATATGRLSSSDPNLQNIPVRTPLGQKIRRAFVAEEGWRLVALDYRQIELRVLAHLSGDENLIRVFQEGKDIHTQTASWMFGLSAEAIDPLMRRAAKTINFGVLYGMSAFRLSQELGIPYEEAQAFIQKYFQSYPKVKAWIEKTLREGRTRGYVETLFGRRRYVPDLNARVKGKREAAERMAFNMPVQGTAADLMKLAMVRLFPQLREVGARMLLQVHDELLLEAPKERAEEVAALAKEVMEGVWPLAVPLEVEVGIGEDWLAAKG

SEQ ID NO: 6379 - DNA, 2523 bp, synthetic construct
  misc_feature 1..2523: note = Variant of DNA polymerase I from Thermus sp. strain 2.9
  source 1..2523: mol_type = other DNA
atgcaccatcatcatcatcatggcggtagcggcgtgttaccggtgttcgagcctaaaggtcgcgtgcttctggttgatggccatcatctcgcgtatcgtaacttctttgccctgaaaggattaaccaccagcctgggcgagccggtacagggtgtctacggctttgcaaagtcgctcctgaaagctctgaaagaagacggtgatgtggtgattgttgtctttgatgcgaaagcgccaagttttcgccacgaagcgtacgaagcttacaaagccgggcgtgctccaacgccggaagactttcctcgccaattggcgcttatgaaggaattagtggatttgcttggcctcgaacgcttggaagttcccggtttcgaggcagacgacgtattagcgactctcgcaaagaaagccgaacgtgagggctatgaagtccagatcttgacagcagatcgcgatcttttccagcttttatctccgcgcatctcggtgttacacccggaagggcatcgtatcaccccggaatggctctgggagaaatatggtttgcgtcccgaacaatgggtggattttcgcgccttagcaggcgatccgagcgacaatattccgggagttaaaggtatcggcgagaagacggcgctcaagctccttaaagaatgggggtcgttggagaacttgcttaagaatttagatcaggtcaaaccagagtcagtgcgtgagaagattcttgctcacctcgaagacctcaaattaagccgcgaattgtcccgtgtacgcaccgatttgccgctcgaagttgatttcggtcgccgccgcgaacctgactgggagggtcttaaagcgtttttagagcgtcttgaatttggttcgctcttgcatgaattcggccttttagaaagcccgttactggccgaagaagcaccttggccaccgcccgagggcgcgtttttaggttaccgtttgagtcgcccggaaccgatgtgggccgaattactggctcttgcagcgtctgcccagggacgtgtgtatcgcgcggaagaccctcatggtgcgctccgcggcctcttcgaagtccgtggactccttgccaaagacttagctgttgttgcattgcgcgaaggtcttgatttacctccgactgatgatccaatgcttcttgcgtacctcttggacccgtcaaacacgacgcccgaaggcgtagcccgtcgttacggcggcgagtggaccgaagatgcagcgaaacgcgcgttattggccgaacgtttgcacgaaaatttattaggacgtttgcaaggcgaggaacgtctcctctggctttacgaagaagtggagaaaccattgagtcgcgtgctcgcgcatatggaagctaccggtgtcaaattagacgtggcgtatttggagaatctcagccttgaagttgctgcccacatgcgccgcttggaggaagaagtattccgtttagcaggccgttcctttcgccttaactctcgcgatcagttagaacgtgtgttgttcgatgaacttggtctccctcctatcggcaagacagagaagaccggtaaacgtagcacttcagcggcggttttagaagctcttcgcgaagtccatcccattgtggacaagatcttgcagtaccgcgaaatggcgaaattgaaaggcacctatattgaccgtcttccggcattagtccacccgaaaacgggacgcctccatacccgcttcaaccaaacagccacggcgaccggtcgtttgtcctcctctgatccaaaccttcagaatattccagtacgtaccccattgggccagaagatccgccgtgcgtttgtagctgaggagggttggcgtttagtggccctcgattatcgtcaaattgaattacgtgtccttgcccatctttctggcgatgagaacctcatccgcgtgtttcaggaaggcaaagacattcacactcaaacggcaagctggatgtttggattatcagctgaagcgatcgatcctttgatgcgtcgtgcagcgaagaccatcaatttcggtgttctctacggtatgagtgcctttcgtttgtcgcaggaattaggcattccctatgaagaagctcaggcgttcattcagaaatactttcaaagctatcccaaagttaaagcatggatcgagaagactctccgtgaaggccgcacacgtggttacgtagagaccttatttggacgtcgccgctatgttcccgatttaaacgctcgcgtgaaaggcaagcgtgaagccgccgaacgcatggcgttcaacatgcctgtacagggcacggcagctgacctcatgaaacttgcaatggtgcgcctttttccacaattgcgtgaagttcaggcccgcatgctcttgcaggtccacgatgaactcttgttagaagcgccaaaagagcgtgcggaagaggtggcagccctcgcgaaagaagttatggaaggcgtgtggcccttagcggtgcctcttgaagtcgaagttggtattggcgaggattggctggctgccaaagga

SEQ ID NO: 6380 - protein, 841 aa, synthetic construct
  REGION 1..841: note = Variant of DNA polymerase I from Thermus sp. strain 2.9
MHHHHHHGGSGVLPVFEPKGRVLLVDGHHLAYRNFFALKGLTTSLGEPVQGVYGFAKSLLKALKEDGDVVIVVFDAKAPSFRHEAYEAYKAGRAPTPEDFPRQLALMKELVDLLGLERLEVPGFEADDVLATLAKKAEREGYEVQILTADRDLFQLLSPRISVLHPEGHRITPEWLWEKYGLRPEQWVDFRALAGDPSDNIPGVKGIGEKTALKLLKEWGSLENLLKNLDQVKPESVREKILAHLEDLKLSRELSRVRTDLPLEVDFGRRREPDWEGLKAFLERLEFGSLLHEFGLLESPLLAEEAPWPPPEGAFLGYRLSRPEPMWAELLALAASAQGRVYRAEDPHGALRGLFEVRGLLAKDLAVVALREGLDLPPTDDPMLLAYLLDPSNTTPEGVARRYGGEWTEDAAKRALLAERLHENLLGRLQGEERLLWLYEEVEKPLSRVLAHMEATGVKLDVAYLENLSLEVAAHMRRLEEEVFRLAGRSFRLNSRDQLERVLFDELGLPPIGKTEKTGKRSTSAAVLEALREVHPIVDKILQYREMAKLKGTYIDRLPALVHPKTGRLHTRFNQTATATGRLSSSDPNLQNIPVRTPLGQKIRRAFVAEEGWRLVALDYRQIELRVLAHLSGDENLIRVFQEGKDIHTQTASWMFGLSAEAIDPLMRRAAKTINFGVLYGMSAFRLSQELGIPYEEAQAFIQKYFQSYPKVKAWIEKTLREGRTRGYVETLFGRRRYVPDLNARVKGKREAAERMAFNMPVQGTAADLMKLAMVRLFPQLREVQARMLLQVHDELLLEAPKERAEEVAALAKEVMEGVWPLAVPLEVEVGIGEDWLAAKG

SEQ ID NO: 6381 - DNA, 2523 bp, synthetic construct
  misc_feature 1..2523: note = Variant of DNA polymerase I from Thermus sp. strain 2.9
  source 1..2523: mol_type = other DNA
atgcaccatcatcatcatcatggcggtagcggcgtgttaccggtgttcgagcctaaaggtcgcgtgcttctggttgatggccatcatctcgcgtatcgtaacttctttgccctgaaaggattaaccaccagcctgggcgagccggtacagggtgtctacggctttgcaaagtcgctcctgaaagctctgaaagaagacggtgatgtggtgattgttgtctttgatgcgaaagcgccaagttttcgccacgaagcgtacgaagcttacaaagccgggcgtgctccaacgccggaagactttcctcgccaattggcgcttatgaaggaattagtggatttgcttggcctcgaacgcttggaagttcccggtttcgaggcagacgacgtattagcgactctcgcaaagaaagccgaacgtgagggctatgaagtccagatcttgacagcagatcgcgatcttttccagcttttatctccgcgcatctcggtgttacacccggaagggcatcgtatcaccccggaatggctctgggagaaatatggtttgcgtcccgaacaatgggtggattttcgcgccttagcaggcgatccgagcgacaatattccgggagttaaaggtatcggcgagaagacggcgctcaagctccttaaagaatgggggtcgttggagaacttgcttaagaatttagatcaggtcaaaccagagtcagtgcgtgagaagattcttgctcacctcgaagacctcaaattaagccgcgaattgtcccgtgtacgcaccgatttgccgctcgaagttgatttcggtcgccgccgcgaacctgactgggagggtcttaaagcgtttttagagcgtcttgaatttggttcgctcttgcatgaattcggccttttagaaagcccgttactggccgaagaagcaccttggccaccgcccgagggcgcgtttttaggttaccgtttgagtcgcccggaaccgatgtgggccgaattactggctcttgcagcgtctgcccagggacgtgtgtatcgcgcggaagaccctcatggtgcgctccgcggcctcttcgaagtccgtggactccttgccaaagacttagctgttgttgcattgcgcgaaggtcttgatttacctccgactgatgatccaatgcttcttgcgtacctcttggacccgtcaaacacgacgcccgaaggcgtagcccgtcgttacggcggcgagtggaccgaagatgcagcgaaacgcgcgttattggccgaacgtttgcacgaaaatttattaggacgtttgcaaggcgaggaacgtctcctctggctttacgaagaagtggagaaaccattgagtcgcgtgctcgcgcatatggaagctaccggtgtcaaattagacgtggcgtatttggagaatctcagccttgaagttgctgcccacatgcgccgcttggaggaagaagtattccgtttagcaggccgttcctttcgccttaactctcgcgatcagttagaacgtgtgttgttcgatgaacttggtctccctcctatcggcaagacagagaagaccggtaaacgtagcacttcagcggcggttttagaagctcttcgcgaagtccatcccattgtggacaagatcttgcagtaccgcgaaatggcgaaattgaaaggcacctatattgaccgtcttccggcattagtccacccgaaaacgggacgcctccatacccgcttcaaccaaacagccacggcgaccggtcgtttgtcctcctctgatccaaaccttcagaatattccagtacgtaccccattgggccagaagatccgccgtgcgtttgtagctgaggagggttggcgtttagtgtctctcgattatcgtcaaattgaattacgtgtccttgcccatctttctggcgatgagaacctcatccgcgtgtttcaggaaggcaaagacattcacactcaaacggcaagctggatgtttggattatcagctgaagcgatcgatcctttgatgcgtcgtgcagcgaagaccatcaatttcggtgttctctacggtatgagtgcctttcgtttgtcgcaggaattaggcattccctatgaagaagctcaggcgttcattcagaaatactttcaaagctatcccaaagttaaagcatggatcgagaagactctccgtgaaggccgcacacgtggttacgtagagaccttatttggacgtcgccgctatgttcccgatttaaacgctcgcgtgaaaggcaagcgtgaagccgccgaacgcatggcgttcaacatgcctgtacagggcacggcagctgacctcatgaaacttgcaatggtgcgcctttttccacaattgcgtgaagttggtgcccgcatgctcttgcaggtccacgatgaactcttgttagaagcgccaaaagagcgtgcggaagaggtggcagccctcgcgaaagaagttatggaaggcgtgtggcccttagcggtgcctcttgaagtcgaagttggtattggcgaggattggctggctgccaaagga

SEQ ID NO: 6382 - protein, 841 aa, synthetic construct
  REGION 1..841: note = Variant of DNA polymerase I from Thermus sp. strain 2.9
MHHHHHHGGSGVLPVFEPKGRVLLVDGHHLAYRNFFALKGLTTSLGEPVQGVYGFAKSLLKALKEDGDVVIVVFDAKAPSFRHEAYEAYKAGRAPTPEDFPRQLALMKELVDLLGLERLEVPGFEADDVLATLAKKAEREGYEVQILTADRDLFQLLSPRISVLHPEGHRITPEWLWEKYGLRPEQWVDFRALAGDPSDNIPGVKGIGEKTALKLLKEWGSLENLLKNLDQVKPESVREKILAHLEDLKLSRELSRVRTDLPLEVDFGRRREPDWEGLKAFLERLEFGSLLHEFGLLESPLLAEEAPWPPPEGAFLGYRLSRPEPMWAELLALAASAQGRVYRAEDPHGALRGLFEVRGLLAKDLAVVALREGLDLPPTDDPMLLAYLLDPSNTTPEGVARRYGGEWTEDAAKRALLAERLHENLLGRLQGEERLLWLYEEVEKPLSRVLAHMEATGVKLDVAYLENLSLEVAAHMRRLEEEVFRLAGRSFRLNSRDQLERVLFDELGLPPIGKTEKTGKRSTSAAVLEALREVHPIVDKILQYREMAKLKGTYIDRLPALVHPKTGRLHTRFNQTATATGRLSSSDPNLQNIPVRTPLGQKIRRAFVAEEGWRLVSLDYRQIELRVLAHLSGDENLIRVFQEGKDIHTQTASWMFGLSAEAIDPLMRRAAKTINFGVLYGMSAFRLSQELGIPYEEAQAFIQKYFQSYPKVKAWIEKTLREGRTRGYVETLFGRRRYVPDLNARVKGKREAAERMAFNMPVQGTAADLMKLAMVRLFPQLREVGARMLLQVHDELLLEAPKERAEEVAALAKEVMEGVWPLAVPLEVEVGIGEDWLAAKG

SEQ ID NO: 6383 - DNA, 2523 bp, synthetic construct
  misc_feature 1..2523: note = Variant of DNA polymerase I from Thermus sp. strain 2.9
  source 1..2523: mol_type = other DNA
atgcaccatcatcatcatcatggcggtagcggcgtgttaccggtgttcgagcctaaaggtcgcgtgcttctggttgatggccatcatctcgcgtatcgtaacttctttgccctgaaaggattaaccaccagcctgggcgagccggtacagggtgtctacggctttgcaaagtcgctcctgaaagctctgaaagaagacggtgatgtggtgattgttgtctttgatgcgaaagcgccaagttttcgccacgaagcgtacgaagcttacaaagccgggcgtgctccaacgccggaagactttcctcgccaattggcgcttatgaaggaattagtggatttgcttggcctcgaacgcttggaagttcccggtttcgaggcagacgacgtattagcgactctcgcaaagaaagccgaacgtgagggctatgaagtccagatcttgacagcagatcgcgatcttttccagcttttatctccgcgcatctcggtgttacacccggaagggcatcgtatcaccccggaatggctctgggagaaatatggtttgcgtcccgaacaatgggtggattttcgcgccttagcaggcgatccgagcgacaatattccgggagttaaaggtatcggcgagaagacggcgctcaagctccttaaagaatgggggtcgttggagaacttgcttaagaatttagatcaggtcaaaccagagtcagtgcgtgagaagattcttgctcacctcgaagacctcaaattaagccgcgaattgtcccgtgtacgcaccgatttgccgctcgaagttgatttcggtcgccgccgcgaacctgactgggagggtcttaaagcgtttttagagcgtcttgaatttggttcgctcttgcatgaattcggccttttagaaagcccgttactggccgaagaagcaccttggccaccgcccgagggcgcgtttttaggttaccgtttgagtcgcccggaaccgatgtgggccgaattactggctcttgcagcgtctgcccagggacgtgtgtatcgcgcggaagaccctcatggtgcgctccgcggcctcttcgaagtccgtggactccttgccaaagacttagctgttgttgcattgcgcgaaggtcttgatttacctccgactgatgatccaatgcttcttgcgtacctcttggacccgtcaaacacgacgcccgaaggcgtagcccgtcgttacggcggcgagtggaccgaagatgcagcgaaacgcgcgttattggccgaacgtttgcacgaaaatttattaggacgtttgcaaggcgaggaacgtctcctctggctttacgaagaagtggagaaaccattgagtcgcgtgctcgcgcatatggaagctaccggtgtcaaattagacgtggcgtatttggagaatctcagccttgaagttgctgcccacatgcgccgcttggaggaagaagtattccgtttagcaggccgttcctttcgccttaactctcgcgatcagttagaacgtgtgttgttcgatgaacttggtctccctcctatcggcaagacagagaagaccggtaaacgtagcacttcagcggcggttttagaagctcttcgcgaagtccatcccattctggacaagatcttgcagtaccgcgaaatggcgaaattgaaaggcacctatattgaccgtcttccggcattagtccacccgaaaacgggacgcctccatacccgcttcaaccaaacagccacggcgaccggtcgtttgtcctcctctgatccaaaccttcagaatattccagtacgtaccccattgggccagaagatccgccgtgcgtttgtagctgaggagggttggcgtttagtggccctcgattatcgtcaaattgaattacgtgtccttgcccatctttctggcgatgagaacctcatccgcgtgtttcaggaaggcaaagacattcacactcaaacggcaagctggatgtttggattatcagctgaagcgatcgatcctttgatgcgtcgtgcagcgaagaccatcaatttcggtgttctctacggtatgagtgcctttcgtttgtcgcaggaattaggcattccctatgaagaagctcaggcgttcattcagaaatactttcaaagctatcccaaagttaaagcatggatcgagaagactctccgtgaaggccgcacacgtggttacgtagagaccttatttggacgtcgccgctatgttcccgatttaaacgctcgcgtgaaaggcaagcgtgaagccgccgaacgcatggcgttcaacatgcctgtacagggcacggcagctgacctcatgaaacttgcaatggtgcgcctttttccacaattgcgtgaagttggtgcccgcatgctcttgcaggtccacgatgaactcttgttagaagcgccaaaagagcgtgcggaagaggtggcagccctcgcgaaagaagttatggaaggcgtgtggcccttagcggtgcctcttgaagtcgaagttggtattggcgaggattggctggctgccaaagga

SEQ ID NO: 6384 - protein, 841 aa, synthetic construct
  REGION 1..841: note = Variant of DNA polymerase I from Thermus sp. strain 2.9
MHHHHHHGGSGVLPVFEPKGRVLLVDGHHLAYRNFFALKGLTTSLGEPVQGVYGFAKSLLKALKEDGDVVIVVFDAKAPSFRHEAYEAYKAGRAPTPEDFPRQLALMKELVDLLGLERLEVPGFEADDVLATLAKKAEREGYEVQILTADRDLFQLLSPRISVLHPEGHRITPEWLWEKYGLRPEQWVDFRALAGDPSDNIPGVKGIGEKTALKLLKEWGSLENLLKNLDQVKPESVREKILAHLEDLKLSRELSRVRTDLPLEVDFGRRREPDWEGLKAFLERLEFGSLLHEFGLLESPLLAEEAPWPPPEGAFLGYRLSRPEPMWAELLALAASAQGRVYRAEDPHGALRGLFEVRGLLAKDLAVVALREGLDLPPTDDPMLLAYLLDPSNTTPEGVARRYGGEWTEDAAKRALLAERLHENLLGRLQGEERLLWLYEEVEKPLSRVLAHMEATGVKLDVAYLENLSLEVAAHMRRLEEEVFRLAGRSFRLNSRDQLERVLFDELGLPPIGKTEKTGKRSTSAAVLEALREVHPILDKILQYREMAKLKGTYIDRLPALVHPKTGRLHTRFNQTATATGRLSSSDPNLQNIPVRTPLGQKIRRAFVAEEGWRLVALDYRQIELRVLAHLSGDENLIRVFQEGKDIHTQTASWMFGLSAEAIDPLMRRAAKTINFGVLYGMSAFRLSQELGIPYEEAQAFIQKYFQSYPKVKAWIEKTLREGRTRGYVETLFGRRRYVPDLNARVKGKREAAERMAFNMPVQGTAADLMKLAMVRLFPQLREVGARMLLQVHDELLLEAPKERAEEVAALAKEVMEGVWPLAVPLEVEVGIGEDWLAAKG

SEQ ID NO: 6385 - DNA, 2523 bp, synthetic construct
  misc_feature 1..2523: note = Variant of DNA polymerase I from Thermus sp. strain 2.9
  source 1..2523: mol_type = other DNA
atgcaccatcatcatcatcatggcggtagcggcgtgttaccggtgttcgagcctaaaggtcgcgtgcttctggttgatggccatcatctcgcgtatcgtaacttctttgccctgaaaggattaaccaccagcctgggcgagccggtacagggtgtctacggctttgcaaagtcgctcctgaaagctctgaaagaagacggtgatgtggtgattgttgtctttgatgcgaaagcgccaagttttcgccacgaagcgtacgaagcttacaaagccgggcgtgctccaacgccggaagactttcctcgccaattggcgcttatgaaggaattagtggatttgcttggcctcgaacgcttggaagttcccggtttcgaggcagacgacgtattagcgactctcgcaaagaaagccgaacgtgagggctatgaagtccagatcttgacagcagatcgcgatcttttccagcttttatctccgcgcatctcggtgttacacccggaagggcatcgtatcaccccggaatggctctgggagaaatatggtttgcgtcccgaacaatgggtggattttcgcgccttagcaggcgatccgagcgacaatattccgggagttaaaggtatcggcgagaagacggcgctcaagctccttaaagaatgggggtcgttggagaacttgcttaagaatttagatcaggtcaaaccagagtcagtgcgtgagaagattcttgctcacctcgaagacctcaaattaagccgcgaattgtcccgtgtacgcaccgatttgccgctcgaagttgatttcggtcgccgccgcgaacctgactgggagggtcttaaagcgtttttagagcgtcttgaatttggttcgctcttgcatgaattcggccttttagaaagcccgttactggccgaagaagcaccttggccaccgcccgagggcgcgtttttaggttaccgtttgagtcgcccggaaccgatgtgggccgaattactggctcttgcagcgtctgcccagcctcgtgtgtatcgcgcggaagaccctcatggtgcgctccgcggcctcttcgaagtccgtggactccttgccaaagacttagctgttgttgcattgcgcgaaggtcttgatttacctccgactgatgatccaatgcttcttgcgtacctcttggacccgtcaaacacgacgcccgaaggcgtagcccgtcgttacggcggcgagtggaccgaagatgcagcgaaacgcgcgttattggccgaacgtttgcacgaaaatttattaggacgtttgcaaggcgaggaacgtctcctctggctttacgaagaagtggagaaaccattgagtcgcgtgctcgcgcatatggaagctaccggtgtcaaattagacgtggcgtatttggagaatctcagccttgaagttgctgcccacatgcgccgcttggaggaagaagtattccgtttagcaggccgttcctttcgccttaactctcgcgatcagttagaacgtgtgttgttcgatgaacttggtctccctcctatcggcaagacagagaagaccggtaaacgtagcacttcagcggcggttttagaagctcttcgcgaagtccatcccattgtggacaagatcttgcagtaccgcgaaatggcgaaattgaaaggcacctatattgaccgtcttccggcattagtccacccgaaaacgggacgcctccatacccgcttcaaccaaacagccacggcgaccggtcgtttgtcctcctctgatccaaaccttcagaatattccagtacgtaccccattgggccagaagatccgccgtgcgtttgtagctgaggagggttggcgtttagtggccctcgattatcgtcaaattgaattacgtgtccttgcccatctttctggcgatgagaacctcatccgcgtgtttcaggaaggcaaagacattcacactcaaacggcaagctggatgtttggattatcagctgaagcgatcgatcctttgatgcgtcgtgcagcgaagaccatcaatttcggtgttctctacggtatgagtgcctttcgtttgtcgcaggaattaggcattccctatgaagaagctcaggcgttcattcagaaatactttcaaagctatcccaaagttaaagcatggatcgagaagactctccgtgaaggccgcacacgtggttacgtagagaccttatttggacgtcgccgctatgttcccgatttaaacgctcgcgtgaaaggcaagcgtgaagccgccgaacgcatggcgttcaacatgcctgtacagggcacggcagctgacctcatgaaacttgcaatggtgcgcctttttccacaattgcgtgaagttggtgcccgcatgctcttgcaggtccacgatgaactcttgttagaagcgccaaaagagcgtgcggaagaggtggcagccctcgcgaaagaagttatggaaggcgtgtggcccttagcggtgcctcttgaagtcgaagttggtattggcgaggattggctggctgccaaagga

SEQ ID NO: 6386 - protein, 841 aa, synthetic construct
  REGION 1..841: note = Variant of DNA polymerase I from Thermus sp. strain 2.9
MHHHHHHGGSGVLPVFEPKGRVLLVDGHHLAYRNFFALKGLTTSLGEPVQGVYGFAKSLLKALKEDGDVVIVVFDAKAPSFRHEAYEAYKAGRAPTPEDFPRQLALMKELVDLLGLERLEVPGFEADDVLATLAKKAEREGYEVQILTADRDLFQLLSPRISVLHPEGHRITPEWLWEKYGLRPEQWVDFRALAGDPSDNIPGVKGIGEKTALKLLKEWGSLENLLKNLDQVKPESVREKILAHLEDLKLSRELSRVRTDLPLEVDFGRRREPDWEGLKAFLERLEFGSLLHEFGLLESPLLAEEAPWPPPEGAFLGYRLSRPEPMWAELLALAASAQPRVYRAEDPHGALRGLFEVRGLLAKDLAVVALREGLDLPPTDDPMLLAYLLDPSNTTPEGVARRYGGEWTEDAAKRALLAERLHENLLGRLQGEERLLWLYEEVEKPLSRVLAHMEATGVKLDVAYLENLSLEVAAHMRRLEEEVFRLAGRSFRLNSRDQLERVLFDELGLPPIGKTEKTGKRSTSAAVLEALREVHPIVDKILQYREMAKLKGTYIDRLPALVHPKTGRLHTRFNQTATATGRLSSSDPNLQNIPVRTPLGQKIRRAFVAEEGWRLVALDYRQIELRVLAHLSGDENLIRVFQEGKDIHTQTASWMFGLSAEAIDPLMRRAAKTINFGVLYGMSAFRLSQELGIPYEEAQAFIQKYFQSYPKVKAWIEKTLREGRTRGYVETLFGRRRYVPDLNARVKGKREAAERMAFNMPVQGTAADLMKLAMVRLFPQLREVGARMLLQVHDELLLEAPKERAEEVAALAKEVMEGVWPLAVPLEVEVGIGEDWLAAKG

SEQ ID NO: 6387 - DNA, 2523 bp, synthetic construct
  misc_feature 1..2523: note = Variant of DNA polymerase I from Thermus sp. strain 2.9
  source 1..2523: mol_type = other DNA
atgcaccatcatcatcatcatggcggtagcggcgtgttaccggtgttcgagcctaaaggtcgcgtgcttctggttgatggccatcatctcgcgtatcgtaacttctttgccctgaaaggattaaccaccagcctgggcgagccggtacagggtgtctacggctttgcaaagtcgctcctgaaagctctgaaagaagacggtgatgtggtgattgttgtctttgatgcgaaagcgccaagttttcgccacgaagcgtacgaagcttacaaagccgggcgtgctccaacgccggaagactttcctcgccaattggcgcttatgaaggaattagtggatttgcttggcctcgaacgcttggaagttcccggtttcgaggcagacgacgtattagcgactctcgcaaagaaagccgaacgtgagggctatgaagtccagatcttgacagcagatcgcgatcttttccagcttttatctccgcgcatctcggtgttacacccggaagggcatcgtatcaccccggaatggctctgggagaaatatggtttgcgtcccgaacaatgggtggattttcgcgccttagcaggcgatccgagcgacaatattccgggagttaaaggtatcggcgagaagacggcgctcaagctccttaaagaatgggggtcgttggagaacttgcttaagaatttagatcaggtcaaaccagagtcagtgcgtgagaagattcttgctcacctcgaagacctcaaattaagccgcgaattgtcccgtgtacgcaccgatttgccgctcgaagttgatttcggccgccgccgcgaacctgactgggagggtcttaaagcgtttttagagcgtcttgaatttggttcgctcttgcatgaattcggccttttagaaagcccgttactggccgaagaagcaccttggccaccgcccgagggcgcgtttttaggttaccgtttgagtcgcccggaaccgatgtgggccgaattactggctcttgcagcgtctgcccagggacgtgtgtatcgcgcggaagaccctcatggtgcgctccgcggcctcttcgaagtccgtggactccttgccaaagacttagctgttgttgcattgcgcgaaggtcttgatttacctccgactgatgatccaatgcttcttgcgtacctcttggacccgtcaaacacgacgcccgaaggcgtagcccgtcgttacggcggcgagtggaccgaagatgcagcgaaacgcgcgttattggccgaacgtttgcacgaaaatttattaggacgtttgcaaggcgaggaacgtctcctctggctttacgaagaagtggagaaaccattgagtcgcgtgctcgcgcatatggaagctaccggtgtcaaattagacgtggcgtatttggagaatctcagccttgaagttgctgcccacatgcgccgcttggaggaagaagtattccgtttagcaggccgttcctttcgccttaactctcgcgatcagttagaacgtgtgttgttcgatgaacttggtctccctcctatcggcaagacagagaagaccggtaaacgtagcacttcagcggcggttttagaagctcttcgcgaagtccatcccattgtggacaagatcttgcagtaccgcgaaatggcgaaattgaaaggcacctatattgaccgtcttccggcattagtccacccgaaaacgggacgcctccatacccgcttcaaccaaacagccacggcgaccggtcgtttgtcctcctctgatccaaaccttcagaatattccagtacgtaccccattgggccagaagatccgccgtgcgtttgtagctgaggagggttggcgtttagtggccctcgattatagtcaaattgaattacgtgtccttgcccatctttctggcgatgagaacctcatccgcgtgtttcaggaaggcaaagacattcacactcaaacggcaagctggatgtttggattatcagctgaagcgatcgatcctttgatgcgtcgtgcagcgaagaccatcaatttcggtgttctctacggtatgagtgcctttcgtttgtcgcaggaattaggcattccctatgaagaagctcaggcgttcattcagaaatactttcaaagctatcccaaagttaaagcatggatcgagaagactctccgcgaaggccgcacacgtggttacgtagagaccttatttggacgtcgccgctatgttcccgatttaaacgctcgcgtgaaaggcaagcgtgaagccgccgaacgcatggcgttcaacatgcctgtacagggcacggcagctgacctcatgaaacttgcaatggtgcgcctttttccacaattgcgtgaagttggtgcccgcatgctcttgcaggtccacgatgaactcttgttagaagcgccaaaagagcgtgcggaagaggtggcagccctcgcgaaagaagttatggaaggcgtgtggcccttagcggtgcctcttgaagtcgaagttggtattggcgaggattggctggctgccaaagga

SEQ ID NO: 6388 - protein, 841 aa, synthetic construct
  REGION 1..841: note = Variant of DNA polymerase I from Thermus sp. strain 2.9
MHHHHHHGGSGVLPVFEPKGRVLLVDGHHLAYRNFFALKGLTTSLGEPVQGVYGFAKSLLKALKEDGDVVIVVFDAKAPSFRHEAYEAYKAGRAPTPEDFPRQLALMKELVDLLGLERLEVPGFEADDVLATLAKKAEREGYEVQILTADRDLFQLLSPRISVLHPEGHRITPEWLWEKYGLRPEQWVDFRALAGDPSDNIPGVKGIGEKTALKLLKEWGSLENLLKNLDQVKPESVREKILAHLEDLKLSRELSRVRTDLPLEVDFGRRREPDWEGLKAFLERLEFGSLLHEFGLLESPLLAEEAPWPPPEGAFLGYRLSRPEPMWAELLALAASAQGRVYRAEDPHGALRGLFEVRGLLAKDLAVVALREGLDLPPTDDPMLLAYLLDPSNTTPEGVARRYGGEWTEDAAKRALLAERLHENLLGRLQGEERLLWLYEEVEKPLSRVLAHMEATGVKLDVAYLENLSLEVAAHMRRLEEEVFRLAGRSFRLNSRDQLERVLFDELGLPPIGKTEKTGKRSTSAAVLEALREVHPIVDKILQYREMAKLKGTYIDRLPALVHPKTGRLHTRFNQTATATGRLSSSDPNLQNIPVRTPLGQKIRRAFVAEEGWRLVALDYSQIELRVLAHLSGDENLIRVFQEGKDIHTQTASWMFGLSAEAIDPLMRRAAKTINFGVLYGMSAFRLSQELGIPYEEAQAFIQKYFQSYPKVKAWIEKTLREGRTRGYVETLFGRRRYVPDLNARVKGKREAAERMAFNMPVQGTAADLMKLAMVRLFPQLREVGARMLLQVHDELLLEAPKERAEEVAALAKEVMEGVWPLAVPLEVEVGIGEDWLAAKG

SEQ ID NO: 6389 - DNA, 2523 bp, synthetic construct
  misc_feature 1..2523: note = Variant of DNA polymerase I from Thermus sp. strain 2.9
  source 1..2523: mol_type = other DNA
atgcaccatcatcatcatcatggcggtagcggcgtgttaccggtgttcgagcctaaaggtcgcgtgcttctggttgatggccatcatctcgcgtatcgtaacttctttgccctgaaaggattaaccaccagcctgggcgagccggtacagggtgtctacggctttgcaaagtcgctcctgaaagctctgaaagaagacggtgatgtggtgattgttgtctttgatgcgaaagcgccaagttttcgccacgaagcgtacgaagcttacaaagccgggcgtgctccaacgccggaagactttcctcgccaattggcgcttatgaaggaattagtggatttgcttggcctcgaacgcttggaagttcccggtttcgaggcagacgacgtattagcgactctcgcaaagaaagccgaacgtgagggctatgaagtccagatcttgacagcagatcgcgatcttttccagcttttatctccgcgcatctcggtgttacacccggaagggcatcgtatcaccccggaatggctctgggagaaatatggtttgcgtcccgaacaatgggtggattttcgcgccttagcaggcgatccgagcgacaatattccgggagttaaaggtatcggcgagaagacggcgctcaagctccttaaagaatgggggtcgttggagaacttgcttaagaatttagatcaggtcaaaccagagtcagtgcgtgagaagattcttgctcacctcgaagacctcaaattaagccgcgaattgtcccgtgtacgcaccgatttgccgctcgaagttgatttcggtcgccgccgcgaacctgactgggagggtcttaaagcgtttttagagcgtcttgaatttggttcgctcttgcatgaattcggccttttagaaagcccgttactggccgaagaagcaccttggccaccgcccgagggcgcgtttttaggttaccgtttgagtcgcccggaaccgatgtgggccgaattactggctcttgcagcgtctgcccagggacgtgtgtatcgcgcggaagaccctcatggtgcgctccgcggcctcttcgaagtccgtggactccttgccaaagacttagctgttgttgcattgcgcgaaggtcttgatttacctccgactgatgatccaatgcttcttgcgtacctcttggacccgtcaaacacgacgcccgaaggcgtagcccgtcgttacggcggcgagtggaccgaagatgcagcgaaacgcgcgttattggccgaacgtttgcacgaaaatttatcgggacgtttgcaaggcgaggaacgtctcctctggctttacgaagaagtggagaaaccattgagtcgcgtgctcgcgcatatggaagctaccggtgtcaaattagacgtggcgtatttggagaatctcagccttgaagttgctgcccacatgcgccgcttggaggaagaagtattccgtttagcaggccgttcctttcgccttaactctcgcgatcagttagaacgtgtgttgttcgatgaacttggtctccctcctatcggcaagacagagaagaccggtaaacgtagcacttcagcggcggttttagaagctcttcgcgaagtccatcccattgtggacaagatcttgcagtaccgcgaaatggcgaaattgaaaggcacctatattgaccgtcttccggcattagtccacccgaaaacgggacgcctccatacccgcttcaaccaaacagccacggcgaccggtcgtttgtcctcctctgatccaaaccttcagaatattccagtacgtaccccattgggccagaagatccgccgtgcgtttgtagctgaggagggttggcgtttagtggccctcgattatcgtcaaattgaattacgtgtccttgcccatctttctggcgatgagaacctcatccgcgtgtttcaggaaggcaaagacattcacactcaaacggcaagctggatgtttggattatcagctgaagcgatcgatcctttgatgcgtcgtgcagcgaagaccatcaatttcggtgttctctacggtatgagtgcctttcgtttgtcgcaggaattaggcattccctatgaagaagctcaggcgttcattcagaaatactttcaaagctatcccaaagttaaagcatggatcgagaagactctccgtgaaggccgcacacgtggttacgtagagaccttatttggacgtcgccgctatgttcccgatttaaacgctcgcgtgaaaggcaagcgtgaagccgccgaacgcatggcgttcaacatgcctgtacagggcacggcagctgacctcatgaaacttgcaatggtgcgcctttttccacaattgcgtgaagttggtgcccgcatgctcttgcaggtccacgatgaactcttgttagaagcgccaaaagagcgtgcggaagaggtggcagccctcgcgaaagaagttatggaaggcgtgtggcccttagcggtgcctcttgaagtcgaagttggtattggcgaggattggctggctgccaaagga

SEQ ID NO: 6390 - protein, 841 aa, synthetic construct
  REGION 1..841: note = Variant of DNA polymerase I from Thermus sp. strain 2.9
MHHHHHHGGSGVLPVFEPKGRVLLVDGHHLAYRNFFALKGLTTSLGEPVQGVYGFAKSLLKALKEDGDVVIVVFDAKAPSFRHEAYEAYKAGRAPTPEDFPRQLALMKELVDLLGLERLEVPGFEADDVLATLAKKAEREGYEVQILTADRDLFQLLSPRISVLHPEGHRITPEWLWEKYGLRPEQWVDFRALAGDPSDNIPGVKGIGEKTALKLLKEWGSLENLLKNLDQVKPESVREKILAHLEDLKLSRELSRVRTDLPLEVDFGRRREPDWEGLKAFLERLEFGSLLHEFGLLESPLLAEEAPWPPPEGAFLGYRLSRPEPMWAELLALAASAQGRVYRAEDPHGALRGLFEVRGLLAKDLAVVALREGLDLPPTDDPMLLAYLLDPSNTTPEGVARRYGGEWTEDAAKRALLAERLHENLSGRLQGEERLLWLYEEVEKPLSRVLAHMEATGVKLDVAYLENLSLEVAAHMRRLEEEVFRLAGRSFRLNSRDQLERVLFDELGLPPIGKTEKTGKRSTSAAVLEALREVHPIVDKILQYREMAKLKGTYIDRLPALVHPKTGRLHTRFNQTATATGRLSSSDPNLQNIPVRTPLGQKIRRAFVAEEGWRLVALDYRQIELRVLAHLSGDENLIRVFQEGKDIHTQTASWMFGLSAEAIDPLMRRAAKTINFGVLYGMSAFRLSQELGIPYEEAQAFIQKYFQSYPKVKAWIEKTLREGRTRGYVETLFGRRRYVPDLNARVKGKREAAERMAFNMPVQGTAADLMKLAMVRLFPQLREVGARMLLQVHDELLLEAPKERAEEVAALAKEVMEGVWPLAVPLEVEVGIGEDWLAAKG

SEQ ID NO: 6391 - DNA, 2523 bp, synthetic construct
  misc_feature 1..2523: note = Variant of DNA polymerase I from Thermus sp. strain 2.9
  source 1..2523: mol_type = other DNA
atgcaccatcatcatcatcatggcggtagcggcgtgttaccggtgttcgagcctaaaggtcgcgtgcttctggttgatggccatcatctcgcgtatcgtaacttctttgccctgaaaggattaaccaccagcctgggcgagccggtacagggtgtctacggctttgcaaagtcgctcctgaaagctctgaaagaagacggtgatgtggtgattgttgtctttgatgcgaaagcgccaagttttcgccacgaagcgtacgaagcttacaaagccgggcgtgctccaacgccggaagactttcctcgccaattggcgcttatgaaggaattagtggatttgcttggcctcgaacgcttggaagttcccggtttcgaggcagacgacgtattagcgactctcgcaaagaaagccgaacgtgagggctatgaagtccagatcttgacagcagatcgcgatcttttccagcttttatctccgcgcatctcggtgttacacccggaagggcatcgtatcaccccggaatggctctgggagaaatatggtttgcgtcccgaacaatgggtggattttcgcgccttagcaggcgatccgagcgacaatattccgggagttaaaggtatcggcgagaagacggcgctcaagctccttaaagaatgggggtcgttggagaacttgcttaagaatttagatcaggtcaaaccagagtcagtgcgtgagaagattcttgctcacctcgaagacctcaaattaagccgcgaattgtcccgtgtacgcaccgatttgccgctcgaagttgatttcggtcgccgccgcgaacctgactgggagggtcttaaagcgtttttagagcgtcttgaatttggttcgctcttgcatgaattcggccttttagaaagcccgttactggccgaagaagcaccttggccaccgcccgagggcgcgtttttaggttaccgtttgagtcgcccggaaccgatgtgggccgaattactggctcttgcagcgtctgcccagggacgtgtgtatcgcgcggaagaccctcatggtgcgctccgcggcctcttcgaagtccgtggactccttgccaaagacttagctgttgttgcattgcgcgaaggtcttgatttacctccgactgatgatccaatgcttcttgcgtacctcttggacccgtcaaacacgacgcccgaaggcgtagcccgtcgttacggcggcgagtggaccgaagatgcagcgaaacgcgcgttattggccgaacgtttgcacgaaaatttattaggacgtttgcaaggcgaggaacgtctcctctggctttacgaagaagtggagaaaccattgagtcgcgtgctcgcgcatatggaagctaccggtgtcaaattagacgtggcgtatttggagaatctcagccttgaagttgctgcccacatgcgccgcttggaggaagaagtattccgtttagcaggccgttcctttcgccttaactctcgcgatcagttagaacgtgtgttgttcgatgaacttggtctccctcctatcggcaagacagagaagaccggtaaacgtagcacttcagcggcggttttagaagctcttcgcgaagtccatcccattgtggacaagatcttgcagtaccgcgaaatggcgaaattgaaaggcacctatattgaccgtcttccggcattagtccacccgaaaacgggacgcctccatacccgcttcaaccaaacagccacggcgaccggtcgtttgtcctcctctgatccaaaccttcagaatattccagtacgtaccccattgggccagaagatccgccgtgcgtttgtagctgaggagggttggcgtttagtggccctcgattatcgtcaaattgaattacgtgtccttgcccatctttctggcgatgagaacctcatccgcgtgtttcaggaaggcaaagacattcacactcaaacggcaagctggatgtttggattatcagctgaagcgatcgatcctttgatgcgtcgtgcagcgaagaccatcaatttcggtgttctctacggtatgagtgcctttcgtttgtcgcaggaattaggcattccctatgaagaagctcaggcgttcattcagaaatactttcaaagctatcccaaagttaaagcatggatcgagaagactctccgtgaaggccgcacacgtggttacgtagagaccttatttggacgtcgccgctatgttcccgatttaaacgctcaggtgaaaggcaagcgtgaagccgccgaacgcatggcgttcaacatgcctgtacagggcacggcagctgacctcatgaaacttgcaatggtgcgcctttttccacaattgcgtgaagttggtgcccgcatgctcttgcaggtccacgatgaactcttgttagaagcgccaaaagagcgtgcggaagaggtggcagccctcgcgaaagaagttatggaaggcgtgtggcccttagcggtgcctcttgaagtcgaagttggtattggcgaggattggctggctgccaaagga

SEQ ID NO: 6392 - protein, 841 aa, synthetic construct
  REGION 1..841: note = Variant of DNA polymerase I from Thermus sp. strain 2.9
MHHHHHHGGSGVLPVFEPKGRVLLVDGHHLAYRNFFALKGLTTSLGEPVQGVYGFAKSLLKALKEDGDVVIVVFDAKAPSFRHEAYEAYKAGRAPTPEDFPRQLALMKELVDLLGLERLEVPGFEADDVLATLAKKAEREGYEVQILTADRDLFQLLSPRISVLHPEGHRITPEWLWEKYGLRPEQWVDFRALAGDPSDNIPGVKGIGEKTALKLLKEWGSLENLLKNLDQVKPESVREKILAHLEDLKLSRELSRVRTDLPLEVDFGRRREPDWEGLKAFLERLEFGSLLHEFGLLESPLLAEEAPWPPPEGAFLGYRLSRPEPMWAELLALAASAQGRVYRAEDPHGALRGLFEVRGLLAKDLAVVALREGLDLPPTDDPMLLAYLLDPSNTTPEGVARRYGGEWTEDAAKRALLAERLHENLLGRLQGEERLLWLYEEVEKPLSRVLAHMEATGVKLDVAYLENLSLEVAAHMRRLEEEVFRLAGRSFRLNSRDQLERVLFDELGLPPIGKTEKTGKRSTSAAVLEALREVHPIVDKILQYREMAKLKGTYIDRLPALVHPKTGRLHTRFNQTATATGRLSSSDPNLQNIPVRTPLGQKIRRAFVAEEGWRLVALDYRQIELRVLAHLSGDENLIRVFQEGKDIHTQTASWMFGLSAEAIDPLMRRAAKTINFGVLYGMSAFRLSQELGIPYEEAQAFIQKYFQSYPKVKAWIEKTLREGRTRGYVETLFGRRRYVPDLNAQVKGKREAAERMAFNMPVQGTAADLMKLAMVRLFPQLREVGARMLLQVHDELLLEAPKERAEEVAALAKEVMEGVWPLAVPLEVEVGIGEDWLAAKG

SEQ ID NO: 6393 - DNA, 2523 bp, synthetic construct
  misc_feature 1..2523: note = Variant of DNA polymerase I from Thermus sp. strain 2.9
  source 1..2523: mol_type = other DNA
atgcaccatcatcatcatcatggcggtagcggcgtgttaccggtgttcgagcctaaaggtcgcgtgcttctggttgatggccatcatctcgcgtatcgtaacttctttgccctgaaaggattaaccaccagcctgggcgagccggtacagggtgtctacggctttgcaaagtcgctcctgaaagctctgaaagaagacggtgatgtggtgattgttgtctttgatgcgaaagcgccaagttttcgccacgaagcgtacgaagcttacaaagccgggcgtgctccaacgccggaagactttcctcgccaattggcgcttatgaaggaattagtggatttgcttggcctcgaacgcttggaagttcccggtttcgaggcagacgacgtattagcgactctcgcaaagaaagccgaacgtgagggctatgaagtccagatcttgacagcagatcgcgatcttttccagcttttatctccgcgcatctcggtgttacacccggaagggcatcgtatcaccccggaatggctctgggagaaatatggtttgcgtcccgaacaatgggtggattttcgcgccttagcaggcgatccgagcgacaatattccgggagttaaaggtatcggcgagaagacggcgctcaagctccttaaagaatgggggtcgttggagaacttgcttaagaatttagatcaggtcaaaccagagtcagtgcgtgagaagattcttgctcacctcgaagacctcaaattaagccgcgaattgtcccgtgtacgcaccgatttgccgctcgaagttgatttccgccgccgccgcgaacctgactgggagggtcttaaagcgtttttagagcgtcttgaatttggttcgctcttgcatgaattcggccttttagaaagcccgttactggccgaagaagcaccttggccaccgcccgagggcgcgtttttaggttaccgtttgagtcgcccggaaccgatgtgggccgaattactggctcttgcagcgtctgcccagggacgtgtgtatcgcgcggaagaccctcatggtgcgctccgcggcctcttcgaagtccgtggactccttgccaaagacttagctgttgttgcattgcgcgaaggtcttgatttacctccgactgatgatccaatgcttcttgcgtacctcttggacccgtcaaacacgacgcccgaaggcgtagcccgtcgttacggcggcgagtggaccgaagatgcagcgaaacgcgcgttattggccgaacgtttgcacgcaaatttattaggacgtttgcaaggcgaggaacgtctcctctggctttacgaagaagtggagaaaccattgagtcgcgtgctcgcgcatatggaagctaccggtgtcaaattagacgtggcgtatttggagaatcttcaccttgaagttgctgccgaaatgcgccgcttggaggaagaagtattccgtttagcaggccgctcctttcgccttaactctcgcgatcagttagaacgtgtgttgttcgatgaacttggtctccctcctatcggcaagacagagaagaccggtaaacgtagcacttcagcggcggttttagaagctcttcgcgaagtccatcccattgtggacaagatcttgcagtaccgcgaaatggcgaaattgaaaggcacctatattgaccgtcttccggcattagtccacccgaaaacgggacgcctccatacccgcttcaaccaaacagccacggcgaccggtcgtttgtccagttctgatccaaaccttcagaatattccagtacgtaccccattgggccagaagatccgccgtgcgtttgtagctgaggagggttggcgtttagtggccctcgattatcgtcaaattgaattacgtgtccttgcccatctttctggcgatgagaacctcatccgcgtgtttcaggaaggcaaagacattcacactcaaacggcaagctggatgtttggattatcagctgaagcgatcgatcctttgatgcgtcgtgcagcgaagaccatcaatttcggtgttctctacggtatgagtgcctttcgtttgtcgcaggaattaggcattccctatgaagaagctcaggcgttcattcagaaatactttcaaagctatcccaaagttaaagcatggatcgagaagactctccgcgaaggccgcacacgtggttacgtagagaccttatttggacgtcgccgctatgttcccgatttaaacgctcgcgtgaaaggcaagcgtgaagccgccgaacgcatggcgttcaacatgcctgtacagggcacggcagctgacctcatgaaacttgcaatggtgcgcctttttccacaattgcgtgaagttggtgcccgcatgctcttgcaggtccacgatgaactcttgttagaagcgccaaaagagcgtgcggaagaggtggcagccctcgcgaaagaagttatggaaggcgtgtggcccttagcggtgcctcttgaagtcgaagttggtattggcgaggattggctggctgccaaagga

SEQ ID NO: 6394 - protein, 841 aa, synthetic construct
  REGION 1..841: note = Variant of DNA polymerase I from Thermus sp. strain 2.9
MHHHHHHGGSGVLPVFEPKGRVLLVDGHHLAYRNFFALKGLTTSLGEPVQGVYGFAKSLLKALKEDGDVVIVVFDAKAPSFRHEAYEAYKAGRAPTPEDFPRQLALMKELVDLLGLERLEVPGFEADDVLATLAKKAEREGYEVQILTADRDLFQLLSPRISVLHPEGHRITPEWLWEKYGLRPEQWVDFRALAGDPSDNIPGVKGIGEKTALKLLKEWGSLENLLKNLDQVKPESVREKILAHLEDLKLSRELSRVRTDLPLEVDFRRRREPDWEGLKAFLERLEFGSLLHEFGLLESPLLAEEAPWPPPEGAFLGYRLSRPEPMWAELLALAASAQGRVYRAEDPHGALRGLFEVRGLLAKDLAVVALREGLDLPPTDDPMLLAYLLDPSNTTPEGVARRYGGEWTEDAAKRALLAERLHANLLGRLQGEERLLWLYEEVEKPLSRVLAHMEATGVKLDVAYLENLHLEVAAEMRRLEEEVFRLAGRSFRLNSRDQLERVLFDELGLPPIGKTEKTGKRSTSAAVLEALREVHPIVDKILQYREMAKLKGTYIDRLPALVHPKTGRLHTRFNQTATATGRLSSSDPNLQNIPVRTPLGQKIRRAFVAEEGWRLVALDYRQIELRVLAHLSGDENLIRVFQEGKDIHTQTASWMFGLSAEAIDPLMRRAAKTINFGVLYGMSAFRLSQELGIPYEEAQAFIQKYFQSYPKVKAWIEKTLREGRTRGYVETLFGRRRYVPDLNARVKGKREAAERMAFNMPVQGTAADLMKLAMVRLFPQLREVGARMLLQVHDELLLEAPKERAEEVAALAKEVMEGVWPLAVPLEVEVGIGEDWLAAKG

SEQ ID NO: 6395 - DNA, 2523 bp, synthetic construct
  misc_feature 1..2523: note = Variant of DNA polymerase I from Thermus sp. strain 2.9
  source 1..2523: mol_type = other DNA
atgcaccatcatcatcatcatggcggtagcggcgtgttaccggtgttcgagcctaaaggtcgcgtgcttctggttgatggccatcatctcgcgtatcgtaacttctttgccctgaaaggattaaccaccagcctgggcgagccggtacagggtgtctacggctttgcaaagtcgctcctgaaagctctgaaagaagacggtgatgtggtgattgttgtctttgatgcgaaagcgccaagttttcgccacgaagcgtacgaagcttacaaagccgggcgtgctccaacgccggaagactttcctcgccaattggcgcttatgaaggaattagtggatttgcttggcctcgaacgcttggaagttcccggtttcgaggcagacgacgtattagcgactctcgcaaagaaagccgaacgtgagggctatgaagtccagatcttgacagcagatcgcgatcttttccagcttttatctccgcgcatctcggtgttacacccggaagggcatcgtatcaccccggaatggctctgggagaaatatggtttgcgtcccgaacaatgggtggattttcgcgccttagcaggcgatccgagcgacaatattccgggagttaaaggtatcggcgagaagacggcgctcaagctccttaaagaatgggggtcgttggagaacttgcttaagaatttagatcaggtcaaaccagagtcagtgcgtgagaagattcttgctcacctcgaagacctcaaattaagccgcgaattgtcccgtgtacgcaccgatttgccgctcgaagttgatttcggtcgccgccgcgaacctgactgggagggtcttaaagcgtttttagagcgtcttgaatttggttcgctcttgcatgaattcggccttttagaaagcccgttactggccgaagaagcaccttggccaccgcccgagggcgcgtttttaggttaccgtttgagtcgcccggaaccgatgtgggccgaattactggctcttgcagcgtctgcccagggacgtgtgtatcgcgcggaagaccctcatggtgcgctccgcggcctcttcgaagtccgtggactccttgccaaagacttagctgttgttgcattgcgcgaaggtcttgatttacctccgactgatgatccaatgcttcttgcgtacctcttggacccgtcaaacacgacgcccgaaggcgtagcccgtcgttacggcggcgagtggaccgaagatgcagcgaaacgcgcgttattggccgaacgtttgcacgaaaatttattaggacgtttgcaaggcgaggaacgtctcctctggctttacgaagaagtggagaaaccattgagtcgcgtgctcgcgcatatggaagctaccggtgtcaaattagacgtggcgtatttggagaatctcagccttgaagttgctgcccacatgcgccgcttggaggaagaagtattccgtttagcaggccgttcctttcgccttaactctcgcgatcagttagaacgtgtgttgttcgatgaacttggtctccctcctatcggcaagacagagaagaccggtaaacgtagcacttcagcggcggttttagaagctcttcgcgaagtccatcccattgtggacaagatcttgcagtaccgcgaaatggcgaaattgaaaggcacctatattgaccgtcttccggcattagtccacccgaaaacgggacgcctccatacccgcttcaaccaaacagccacggcgaccggtcgtttgtcctcctctgatccaaaccttcagaatattccagtacgtaccccattgggccagaagatccgccgtgcgtttgtagctgaggagggttggcgtttagtggccctcgattatcgtcaaattgaattacgtgtccttgcccatctttctggcgatgagaacctcatccgcgtgtttcaggaaggcaaagacattcacactcaaacggcaagctggatgtttggattatcagctgaagcgatcgatcctttgatgcgtcgtgcagcgaagaccatcaatttcggtgttctctacggtatgagtgcctttcgtttgtcgcaggaattaggcattccctatgaagaagctcaggcgttcattcagaaatactttcaaagctatcccaaagttaaagcatggatcgagaagactctccgtgaaggccgcacacgtggttacgtagagaccttatttggacgtcgccgctatgttcccgatttaaacgctcgcgtgaaaggcaagcgtgaagccgccgaacgcatggcgttcaacatgcctgtacagggcacggcagctgacctcatgaaacttgcaatggtgcgcctttttccacaattgcgtgaagttggtgccgagatgctcttgcaggtccacgatgaactcttgttagaagcgccaaaagagcgtgcggaagaggtggcagccctcgcgaaagaagttatggaaggcgtgtggcccttagcggtgcctcttgaagtcgaagttggtattggcgaggattggctggctgccaaagga

SEQ ID NO: 6396 - protein, 841 aa, synthetic construct
  REGION 1..841: note = Variant of DNA polymerase I from Thermus sp. strain 2.9
MHHHHHHGGSGVLPVFEPKGRVLLVDGHHLAYRNFFALKGLTTSLGEPVQGVYGFAKSLLKALKEDGDVVIVVFDAKAPSFRHEAYEAYKAGRAPTPEDFPRQLALMKELVDLLGLERLEVPGFEADDVLATLAKKAEREGYEVQILTADRDLFQLLSPRISVLHPEGHRITPEWLWEKYGLRPEQWVDFRALAGDPSDNIPGVKGIGEKTALKLLKEWGSLENLLKNLDQVKPESVREKILAHLEDLKLSRELSRVRTDLPLEVDFGRRREPDWEGLKAFLERLEFGSLLHEFGLLESPLLAEEAPWPPPEGAFLGYRLSRPEPMWAELLALAASAQGRVYRAEDPHGALRGLFEVRGLLAKDLAVVALREGLDLPPTDDPMLLAYLLDPSNTTPEGVARRYGGEWTEDAAKRALLAERLHENLLGRLQGEERLLWLYEEVEKPLSRVLAHMEATGVKLDVAYLENLSLEVAAHMRRLEEEVFRLAGRSFRLNSRDQLERVLFDELGLPPIGKTEKTGKRSTSAAVLEALREVHPIVDKILQYREMAKLKGTYIDRLPALVHPKTGRLHTRFNQTATATGRLSSSDPNLQNIPVRTPLGQKIRRAFVAEEGWRLVALDYRQIELRVLAHLSGDENLIRVFQEGKDIHTQTASWMFGLSAEAIDPLMRRAAKTINFGVLYGMSAFRLSQELGIPYEEAQAFIQKYFQSYPKVKAWIEKTLREGRTRGYVETLFGRRRYVPDLNARVKGKREAAERMAFNMPVQGTAADLMKLAMVRLFPQLREVGAEMLLQVHDELLLEAPKERAEEVAALAKEVMEGVWPLAVPLEVEVGIGEDWLAAKG

SEQ ID NO: 6397 - DNA, 2523 bp, synthetic construct
  misc_feature 1..2523: note = Variant of DNA polymerase I from Thermus sp. strain 2.9
  source 1..2523: mol_type = other DNA
atgcaccatcatcatcatcatggcggtagcggcgtgttaccggtgttcgagcctaaaggtcgcgtgcttctggttgatggccatcatctcgcgtatcgtaacttctttgccctgaaaggattaaccaccagcctgggcgagccggtacagggtgtctacggctttgcaaagtcgctcctgaaagctctgaaagaagacggtgatgtggtgattgttgtctttgatgcgaaagcgccaagttttcgccacgaagcgtacgaagcttacaaagccgggcgtgctccaacgccggaagactttcctcgccaattggcgcttatgaaggaattagtggatttgcttggcctcgaacgcttggaagttcccggtttcgaggcagacgacgtattagcgactctcgcaaagaaagccgaacgtgagggctatgaagtccagatcttgacagcagatcgcgatcttttccagcttttatctccgcgcatctcggtgttacacccggaagggcatcgtatcaccccggaatggctctgggagaaatatggtttgcgtcccgaacaatgggtggattttcgcgccttagcaggcgatccgagcgacaatattccgggagttaaaggtatcggcgagaagacggcgctcaagctccttaaagaatgggggtcgttggagaacttgcttaagaatttagatcaggtcaaaccagagtcagtgcgtgagaagattcttgctcacctcgaagacctcaaattaagccgcgaattgtcccgtgtacgcaccgatttgccgctcgaagttgatttcggtcgccgccgcgaacctgactgggagggtcttaaagcgtttttagagcgtcttgaatttggttcgctcttgcatgaattcggccttttagaaagcccgttactggccgaagaagcaccttggccaccgcccgagggcgcgtttttaggttaccgtttgagtcgcccggaaccgatgtgggccgaattactggctcttgcagcgtctgcccagggacgtgtgtatcgcgcggaagaccctcatggtgcgctccgcggcctcttcgaagtccgtggactccttgccaaagacttagctgttgttgcattgcgcgaaggtcttgatttacctccgactgatgatccaatgcttcttgcgtacctcttggacccgtcaaacacgacgcccgaaggcgtagcccgtcgttacggcggcgagtggaccgaagatgcagcgaaacgcgcgttattggccgaacgtttgcacgaaaatttattaggacgtttgcaaggcgaggaacgtctcctctggctttacgaagaagtggagaaaccattgagtcgcgtgctcgcgcatatggaagctaccggtgtcaaattagacgtggcgtatttggagaatctcagccttgaagttgctgcccacatgcgccgcttggaggaagaagtattccgtttagcaggccgttcctttcgccttaactctcgcgatcagttagaacgtgtgttgttcgatgaacttggtctccctcctatcggcaagacagagaagaccggtaaacgtagcacttcagcggcggttttagaagctcttcgcgaagtccatcccattgtggacaagatcttgcagtaccgcgaaatggcgaaattgaaaggcacctctattgaccgtcttccggcattagtccacccgaaaacgggacgcctccatacccgcttcaaccaaacagccacggcgaccggtcgtttgtcctcctctgatccaaaccttcagaatattccagtacgtaccccattgggccagaagatccgccgtgcgtttgtagctgaggagggttggcgtttagtggccctcgattatcgtcaaattgaattacgtgtccttgcccatctttctggcgatgagaacctcatccgcgtgtttcaggaaggcaaagacattcacactcaaacggcaagctggatgtttggattatcagctgaagcgatcgatcctttgatgcgtcgtgcagcgaagaccatcaatttcggtgttctctacggtatgagtgcctttcgtttgtcgcaggaattaggcattccctatgaagaagctcaggcgttcattcagaaatactttcaaagctatcccaaagttaaagcatggatcgagaagactctccgtgaaggccgcacacgtggttacgtagagaccttatttggacgtcgccgctatgttcccgatttaaacgctcgcgtgaaaggcaagcgtgaagccgccgaacgcatggcgttcaacatgcctgtacagggcacggcagctgacctcatgaaacttgcaatggtgcgcctttttccacaattgcgtgaagttggtgcccgcatgctcttgcaggtccacgatgaactcttgttagaagcgccaaaagagcgtgcggaagaggtggcagccctcgcgaaagaagttatggaaggcgtgtggcccttagcggtgcctcttgaagtcgaagttggtattggcgaggattggctggctgccaaagga

SEQ ID NO: 6398 - protein, 841 aa, synthetic construct
  REGION 1..841: note = Variant of DNA polymerase I from Thermus sp. strain 2.9
MHHHHHHGGSGVLPVFEPKGRVLLVDGHHLAYRNFFALKGLTTSLGEPVQGVYGFAKSLLKALKEDGDVVIVVFDAKAPSFRHEAYEAYKAGRAPTPEDFPRQLALMKELVDLLGLERLEVPGFEADDVLATLAKKAEREGYEVQILTADRDLFQLLSPRISVLHPEGHRITPEWLWEKYGLRPEQWVDFRALAGDPSDNIPGVKGIGEKTALKLLKEWGSLENLLKNLDQVKPESVREKILAHLEDLKLSRELSRVRTDLPLEVDFGRRREPDWEGLKAFLERLEFGSLLHEFGLLESPLLAEEAPWPPPEGAFLGYRLSRPEPMWAELLALAASAQGRVYRAEDPHGALRGLFEVRGLLAKDLAVVALREGLDLPPTDDPMLLAYLLDPSNTTPEGVARRYGGEWTEDAAKRALLAERLHENLLGRLQGEERLLWLYEEVEKPLSRVLAHMEATGVKLDVAYLENLSLEVAAHMRRLEEEVFRLAGRSFRLNSRDQLERVLFDELGLPPIGKTEKTGKRSTSAAVLEALREVHPIVDKILQYREMAKLKGTSIDRLPALVHPKTGRLHTRFNQTATATGRLSSSDPNLQNIPVRTPLGQKIRRAFVAEEGWRLVALDYRQIELRVLAHLSGDENLIRVFQEGKDIHTQTASWMFGLSAEAIDPLMRRAAKTINFGVLYGMSAFRLSQELGIPYEEAQAFIQKYFQSYPKVKAWIEKTLREGRTRGYVETLFGRRRYVPDLNARVKGKREAAERMAFNMPVQGTAADLMKLAMVRLFPQLREVGARMLLQVHDELLLEAPKERAEEVAALAKEVMEGVWPLAVPLEVEVGIGEDWLAAKG

SEQ ID NO: 6399 - DNA, 2523 bp, synthetic construct
  misc_feature 1..2523: note = Variant of DNA polymerase I from Thermus sp. strain 2.9
  source 1..2523: mol_type = other DNA
atgcaccatcatcatcatcatggcggtagcggcgtgttaccggtgttcgagcctaaaggtcgcgtgcttctggttgatggccatcatctcgcgtatcgtaacttctttgccctgaaaggattaaccaccagcctgggcgagccggtacagggtgtctacggctttgcaaagtcgctcctgaaagctctgaaagaagacggtgatgtggtgattgttgtctttgatgcgaaagcgccaagttttcgccacgaagcgtacgaagcttacaaagccgggcgtgctccaacgccggaagactttcctcgccaattggcgcttatgaaggaattagtggatttgcttggcctcgaacgcttggaagttcccggtttcgaggcagacgacgtattagcgactctcgcaaagaaagccgaacgtgagggctatgaagtccagatcttgacagcagatcgcgatcttttccagcttttatctccgcgcatctcggtgttacacccggaagggcatcgtatcaccccggaatggctctgggagaaatatggtttgcgtcccgaacaatgggtggattttcgcgccttagcaggcgatccgagcgacaatattccgggagttaaaggtatcggcgagaagacggcgctcaagctccttaaagaatgggggtcgttggagaacttgcttaagaatttagatcaggtcaaaccagagtcagtgcgtgagaagattcttgctcacctcgaagacctcaaattaagccgcgaattgtcccgtgtacgcaccgatttgccgctcgaagttgatttcggtcgccgccgcgaacctgactgggagggtcttaaagcgtttttagagcgtcttgaatttggttcgctcttgcatgaattcggccttttagaaagcccgttactggccgaagaagcaccttggccaccgcccgagggcgcgtttttaggttaccgtttgagtcgcccggaaccgatgtgggccgaattactggctcttgcagcgtctgcccagggacgtgtgtatcgcgcggaagaccctcatggtgcgctccgcggcctcttcgaagtccgtggactccttgccaaagacttagctgttgttgcattgcgcgaaggtcttgatttacctccgactgatgatccaatgcttcttgcgtacctcttggacccgtcaaacacgacgcccgaaggcgtagcccgtcgttacggcggcgagtggaccgaagatgcagcgaaacgcgcgttattggccgaacgtttgcacgaaaatttattaggacgtttgcaaggcgaggaacgtctcctctggctttacgaagaagtggagaaaccattgagtcgcgtgctcgcgcatatggaagctaccggtgtcaaattagacgtggcgtatttggagaatctcagccttgaagttgctgcccacatgcgccgcttggaggaagaagtattccgtttagcaggccgttcctttcgccttaactctcgcgatcagttagaacgtgtgttgttcgatgaacttggtctccctcctatcggcaagacagagaagaccggtaaacgtagcacttcagcggcggttttagaagctcttcgcgaagtccatcccattgtggacaagatcttgcagtaccgcgaaatggcgtctttgaaaggcacctatattgaccgtcttccggcattagtccacccgaaaacgggacgcctccatacccgcttcaaccaaacagccacggcgaccggtcgtttgtcctcctctgatccaaaccttcagaatattccagtacgtaccccattgggccagaagatccgccgtgcgtttgtagctgaggagggttggcgtttagtggccctcgattatcgtcaaattgaattacgtgtccttgcccatctttctggcgatgagaacctcatccgcgtgtttcaggaaggcaaagacattcacactcaaacggcaagctggatgtttggattatcagctgaagcgatcgatcctttgatgcgtcgtgcagcgaagaccatcaatttcggtgttctctacggtatgagtgcctttcgtttgtcgcaggaattaggcattccctatgaagaagctcaggcgttcattcagaaatactttcaaagctatcccaaagttaaagcatggatcgagaagactctccgtgaaggccgcacacgtggttacgtagagaccttatttggacgtcgccgctatgttcccgatttaaacgctcgcgtgaaaggcaagcgtgaagccgccgaacgcatggcgttcaacatgcctgtacagggcacggcagctgacctcatgaaacttgcaatggtgcgcctttttccacaattgcgtgaagttggtgcccgcatgctcttgcaggtccacgatgaactcttgttagaagcgccaaaagagcgtgcggaagaggtggcagccctcgcgaaagaagttatggaaggcgtgtggcccttagcggtgcctcttgaagtcgaagttggtattggcgaggattggctggctgccaaagga

SEQ ID NO: 6400 - protein, 841 aa, synthetic construct
  REGION 1..841: note = Variant of DNA polymerase I from Thermus sp. strain 2.9
MHHHHHHGGSGVLPVFEPKGRVLLVDGHHLAYRNFFALKGLTTSLGEPVQGVYGFAKSLLKALKEDGDVVIVVFDAKAPSFRHEAYEAYKAGRAPTPEDFPRQLALMKELVDLLGLERLEVPGFEADDVLATLAKKAEREGYEVQILTADRDLFQLLSPRISVLHPEGHRITPEWLWEKYGLRPEQWVDFRALAGDPSDNIPGVKGIGEKTALKLLKEWGSLENLLKNLDQVKPESVREKILAHLEDLKLSRELSRVRTDLPLEVDFGRRREPDWEGLKAFLERLEFGSLLHEFGLLESPLLAEEAPWPPPEGAFLGYRLSRPEPMWAELLALAASAQGRVYRAEDPHGALRGLFEVRGLLAKDLAVVALREGLDLPPTDDPMLLAYLLDPSNTTPEGVARRYGGEWTEDAAKRALLAERLHENLLGRLQGEERLLWLYEEVEKPLSRVLAHMEATGVKLDVAYLENLSLEVAAHMRRLEEEVFRLAGRSFRLNSRDQLERVLFDELGLPPIGKTEKTGKRSTSAAVLEALREVHPIVDKILQYREMASLKGTYIDRLPALVHPKTGRLHTRFNQTATATGRLSSSDPNLQNIPVRTPLGQKIRRAFVAEEGWRLVALDYRQIELRVLAHLSGDENLIRVFQEGKDIHTQTASWMFGLSAEAIDPLMRRAAKTINFGVLYGMSAFRLSQELGIPYEEAQAFIQKYFQSYPKVKAWIEKTLREGRTRGYVETLFGRRRYVPDLNARVKGKREAAERMAFNMPVQGTAADLMKLAMVRLFPQLREVGARMLLQVHDELLLEAPKERAEEVAALAKEVMEGVWPLAVPLEVEVGIGEDWLAAKG

SEQ ID NO: 6401 - DNA, 2523 bp, synthetic construct
  misc_feature 1..2523: note = Variant of DNA polymerase I from Thermus sp. strain 2.9
  source 1..2523: mol_type = other DNA
atgcaccatcatcatcatcatggcggtagcggcgtgttaccggtgttcgagcctaaaggtcgcgtgcttctggttgatggccatcatctcgcgtatcgtaacttctttgccctgaaaggattaaccaccagccgcggcgagccggtacagggtgtctacggctttgcaaagtcgctcctgaaagctctgaaagaagacggtgatgtggtgattgttgtctttgatgcgaaagcgccaagttttcgccacgaagcgtacgaagcttacaaagccgggcgtgctccaacgccggaagactttcctcgccaattggcgcttatgaaggaattagtggatttgcttggcctcgaacgcttggaagttcccggtttcgaggcagacgacgtattagcgactctcgcaaagaaagccgaacgtgagggctatgaagtccagatcttgacagcagatcgcgatcttttccagcttttatctccgcgcatctcggtgttacacccggaagggcatcgtatcaccccggaatggctctgggagaaatatggtttgcgtcccgaacaatgggtggattttcgcgccttagcaggcgatccgagcgacaatattccgggagttaaaggtatcggcgagaagacggcgctcaagctccttaaagaatgggggtcgttggagaacttgcttaagaatttagatcaggtcaaaccagagtcagtgcgtgagaagattcttgctcacctcgaagacctcaaattaagccgcgaattgtcccgtgtacgcaccgatttgccgctcgaagttgatttcggtcgccgccgcgaacctgactgggagggtcttaaagcgtttttagagcgtcttgaatttggttcgctcttgcatgaattcggccttttagaaagcccgttaccggccgaagaagcaccttggccaccgcccgagggcgcgtttttaggttaccgtttgagtcgcccggaaccgatgtgggccgaattactggctcttgcagcgtctgcccagggacgtgtgtatcgcgcggaagaccctcatggtgcgctccgcggcctcttcgaagtccgtggactccttgccaaagacttagctgttgttgcattgcgcgaaggtcttgatttacctccgactgatgatccaatgcttcttgcgtacctcttggacccgtcaaacacgacgcccgaaggcgtagcccgtcgttacggcggcgagtggaccgaagatgcagcgaaacgcgcgttattggccgaacgtttgcacgcaaatttattaggacgtttgcaaggcgaggaacgtctcctctggctttacgaagaagtggagaaaccattgagtcgcgtgctcgcgcatatggaagctaccggtgtcaaattagacgtggcgtatttggagaatcttcaccttgaagttgctgccgaaatgcgccgcttggaggaagaagtattccgtttagcaggccgctcctttcgccttaactctcgcgatcagttagaacgtgtgttgttcgatgaacttggtctccctcctatcggcaagacagagaagaccggtaaacgtagcacttcagcggcggttttagaagctcttcgcgaagtccatcccattgtggacaagatcttgcagtaccgcgaaatggcgaaattgaaaggcacctatattgaccgtcttccggcattagtccacccgaaaacgggacgcctccatactcgcttcaaccaaacagccacggcgaccggtcgtttgtccagttctgatccaaaccttcagaatattccagtacgtaccccattgggccagaagatccgccgtgcgtttgtagctgaggagggttggcgtttagtggccctcgattatcgtcaaattgaattacgtgtccttgcccatctttctggcgatgagaacctcatccgcgtgtttcaggaaggcaaagacattcacactcaaacggcaagctggatgtttggattatcagctgaagcgatcgatcctttgatgcgtcgtgcagcgaagaccatcaatttcggtgttctctacggtatgagtgcctttcgtttgtcgcaggaattaggcattccctatgaagaagctcaggcgttcattcagaaatactttcaaagctatcccaaagttaaagcatggatcgagaagactctccgcgaaggccgcacacgtggttacgtagagaccttatttggacgtcgccgctatgttcccgatttaaacgctcgcgtgaaaggcaagcgtgaagccgccgaacgcatggcgttcaacatgcctgtacagggcacggcagctgacctcatgaaacttgcaatggtgcgcctttttccacaattgcgtgaagttggtgcccgcatgctcttgcaggtccacgatgaactcttgttagaagcgccaaaagagcgtgcggaagaggtggcagccctcgcgaaagaagttatggaaggcgtgtggcccttagcggtgcctcttgaagtcgaagttggtattggcgaggattggctggctgccaaagga

SEQ ID NO: 6402 - protein, 841 aa, synthetic construct
  REGION 1..841: note = Variant of DNA polymerase I from Thermus sp. strain 2.9
MHHHHHHGGSGVLPVFEPKGRVLLVDGHHLAYRNFFALKGLTTSRGEPVQGVYGFAKSLLKALKEDGDVVIVVFDAKAPSFRHEAYEAYKAGRAPTPEDFPRQLALMKELVDLLGLERLEVPGFEADDVLATLAKKAEREGYEVQILTADRDLFQLLSPRISVLHPEGHRITPEWLWEKYGLRPEQWVDFRALAGDPSDNIPGVKGIGEKTALKLLKEWGSLENLLKNLDQVKPESVREKILAHLEDLKLSRELSRVRTDLPLEVDFGRRREPDWEGLKAFLERLEFGSLLHEFGLLESPLPAEEAPWPPPEGAFLGYRLSRPEPMWAELLALAASAQGRVYRAEDPHGALRGLFEVRGLLAKDLAVVALREGLDLPPTDDPMLLAYLLDPSNTTPEGVARRYGGEWTEDAAKRALLAERLHANLLGRLQGEERLLWLYEEVEKPLSRVLAHMEATGVKLDVAYLENLHLEVAAEMRRLEEEVFRLAGRSFRLNSRDQLERVLFDELGLPPIGKTEKTGKRSTSAAVLEALREVHPIVDKILQYREMAKLKGTYIDRLPALVHPKTGRLHTRFNQTATATGRLSSSDPNLQNIPVRTPLGQKIRRAFVAEEGWRLVALDYRQIELRVLAHLSGDENLIRVFQEGKDIHTQTASWMFGLSAEAIDPLMRRAAKTINFGVLYGMSAFRLSQELGIPYEEAQAFIQKYFQSYPKVKAWIEKTLREGRTRGYVETLFGRRRYVPDLNARVKGKREAAERMAFNMPVQGTAADLMKLAMVRLFPQLREVGARMLLQVHDELLLEAPKERAEEVAALAKEVMEGVWPLAVPLEVEVGIGEDWLAAKG

SEQ ID NO: 6403 - DNA, 2523 bp, synthetic construct
  misc_feature 1..2523: note = Variant of DNA polymerase I from Thermus sp. strain 2.9
  source 1..2523: mol_type = other DNA
atgcaccatcatcatcatcatggcggtagcggcgtgttaccggtgttcgagcctaaaggtcgcgtgcttctggttgatggccatcatctcgcgtatcgtaacttctttgccctgaaaggattaaccaccagcctgggcgagccggtacagggtgtctacggctttgcaaagtcgctcctgaaagctctgaaagaagacggtgatgtggtgattgttgtctttgatgcgaaagcgccaagttttcgccacgaagcgtacgaagcttacaaagccgggcgtgctccaacgccggaagactttcctcgccaattggcgcttatgaaggaattagtggatttgcttggcctcgaacgcttggaagttcccggtttcgaggcagacgacgtattagcgactctcgcaaagaaagccgaacgtgagggctatgaagtccagatcttgacagcagatcgcgatcttttccagcttttatctccgcgcatctcggtgttacacccggaagggcatcgtatcaccccggaatggctctgggagaaatatggtttgcgtcccgaacaatgggtggattttcgcgccttagcaggcgatccgagcgacaatattccgggagttaaaggtatcggcgagaagacggcgctcaagctccttaaagaatgggggtcgttggagaacttgcttaagaatttagatcaggtcaaaccagagtcagtgcgtgagaagattcttgctcacctcgaagacctcaaattaagccgcgaattgtcccgtgtacgcaccgatttgccgctcgaagttgatttcggtcgccgccgcgaacctgactgggagggtcttaaagcgtttttagagcgtcttgaatttggttcgctcttgcatgaattcggccttttagaaagcccgttactggccgaagaagcaccttggccaccgcccgagggcgcgtttttaggttaccgtttgagtcgcccggaaccgatgtgggccgaattactggctcttgcagcgtctgcccagggacgtgtgtatcgcgcggaagaccctcatggtgcgctccgcggcctcttcgaagtccgtggactccttgccaaagacttagctgttgttgcattgcgcgaaggtcttgatttacctccgactgatgatccaatgcttcttgcgtacctcttggacccgtcaaacacgacgcccgaaggcgtagcccgtcgttacggcggcgagtggaccgaagatgcagcgaaacgcgcgttattggccgaacgtttgcacgaaaatttattaggacgtttgcaaggcgaggggcgtctcctctggctttacgaagaagtggagaaaccattgagtcgcgtgctcgcgcatatggaagctaccggtgtcaaattagacgtggcgtatttggagaatctcagccttgaagttgctgcccacatgcgccgcttggaggaagaagtattccgtttagcaggccgttcctttcgccttaactctcgcgatcagttagaacgtgtgttgttcgatgaacttggtctccctcctatcggcaagacagagaagaccggtaaacgtagcacttcagcggcggttttagaagctcttcgcgaagtccatcccattgtggacaagatcttgcagtaccgcgaaatggcgaaattgaaaggcacctatattgaccgtcttccggcattagtccacccgaaaacgggacgcctccatacccgcttcaaccaaacagccacggcgaccggtcgtttgtcctcctctgatccaaaccttcagaatattccagtacgtaccccattgggccagaagatccgccgtgcgtttgtagctgaggagggttggcgtttagtggccctcgattatcgtcaaattgaattacgtgtccttgcccatctttctggcgatgagaacctcatccgcgtgtttcaggaaggcaaagacattcacactcaaacggcaagctggatgtttggattatcagctgaagcgatcgatcctttgatgcgtcgtgcagcgaagaccatcaatttcggtgttctctacggtatgagtgcctttcgtttgtcgcaggaattaggcattccctatgaagaagctcaggcgttcattcagaaatactttcaaagctatcccaaagttaaagcatggatcgagaagactctccgtgaaggccgcacacgtggttacgtagagaccttatttggacgtcgccgctatgttcccgatttaaacgctcgcgtgaaaggcaagcgtgaagccgccgaacgcatggcgttcaacatgcctgtacagggcacggcagctgacctcatgaaacttgcaatggtgcgcctttttccacaattgcgtgaagttggtgcccgcatgctcttgcaggtccacgatgaactcttgttagaagcgccaaaagagcgtgcggaagaggtggcagccctcgcgaaagaagttatggaaggcgtgtggcccttagcggtgcctcttgaagtcgaagttggtattggcgaggattggctggctgccaaagga

SEQ ID NO: 6404 - protein, 841 aa, synthetic construct
  REGION 1..841: note = Variant of DNA polymerase I from Thermus sp. strain 2.9
MHHHHHHGGSGVLPVFEPKGRVLLVDGHHLAYRNFFALKGLTTSLGEPVQGVYGFAKSLLKALKEDGDVVIVVFDAKAPSFRHEAYEAYKAGRAPTPEDFPRQLALMKELVDLLGLERLEVPGFEADDVLATLAKKAEREGYEVQILTADRDLFQLLSPRISVLHPEGHRITPEWLWEKYGLRPEQWVDFRALAGDPSDNIPGVKGIGEKTALKLLKEWGSLENLLKNLDQVKPESVREKILAHLEDLKLSRELSRVRTDLPLEVDFGRRREPDWEGLKAFLERLEFGSLLHEFGLLESPLLAEEAPWPPPEGAFLGYRLSRPEPMWAELLALAASAQGRVYRAEDPHGALRGLFEVRGLLAKDLAVVALREGLDLPPTDDPMLLAYLLDPSNTTPEGVARRYGGEWTEDAAKRALLAERLHENLLGRLQGEGRLLWLYEEVEKPLSRVLAHMEATGVKLDVAYLENLSLEVAAHMRRLEEEVFRLAGRSFRLNSRDQLERVLFDELGLPPIGKTEKTGKRSTSAAVLEALREVHPIVDKILQYREMAKLKGTYIDRLPALVHPKTGRLHTRFNQTATATGRLSSSDPNLQNIPVRTPLGQKIRRAFVAEEGWRLVALDYRQIELRVLAHLSGDENLIRVFQEGKDIHTQTASWMFGLSAEAIDPLMRRAAKTINFGVLYGMSAFRLSQELGIPYEEAQAFIQKYFQSYPKVKAWIEKTLREGRTRGYVETLFGRRRYVPDLNARVKGKREAAERMAFNMPVQGTAADLMKLAMVRLFPQLREVGARMLLQVHDELLLEAPKERAEEVAALAKEVMEGVWPLAVPLEVEVGIGEDWLAAKG

SEQ ID NO: 6405 - DNA, 2523 bp, synthetic construct
  misc_feature 1..2523: note = Variant of DNA polymerase I from Thermus sp. strain 2.9
  source 1..2523: mol_type = other DNA
atgcaccatcatcatcatcatggcggtagcggcgtgttaccggtgttcgagcctaaaggtcgcgtgcttctggttgatggccatcatctcgcgtatcgtaacttctttgccctgaaaggattaaccaccagcctgggcgagccggtacagggtgtctacggctttgcaaagtcgctcctgaaagctctgaaagaagacggtgatgtggtgattgttgtctttgatgcgaaagcgccaagttttcgccacgaagcgtacgaagcttacaaagccgggcgtgctccaacgccggaagactttcctcgccaattggcgcttatgaaggaattagtggatttgcttggcctcgaacgcttggaagttcccggtttcgaggcagacgacgtattagcgactctcgcaaagaaagccgaacgtgagggctatgaagtccagatcttgacagcagatcgcgatcttttccagcttttatctccgcgcatctcggtgttacacccggaagggcatcgtatcaccccggaatggctctgggagaaatatggtttgcgtcccgaacaatgggtggattttcgcgccttagcaggcgatccgagcgacaatattccgggagttaaaggtatcggcgagaagacggcgctcaagctccttaaagaatgggggtcgttggagaacttgcttaagaatttagatcaggtcaaaccagagtcagtgcgtgagaagattcttgctcacctcgaagacctcaaattaagccgcgaattgtcccgtgtacgcaccgatttgccgctcgaagttgatttcggtcgccgccgcgaacctgactgggagggtcttaaagcgtttttagagcgtcttgaatttggttcgctcttgcatgaattcggccttttagaaagcccgttactggccgaagaagcaccttggccaccgcccgagggctcgtttttaggttaccgtttgagtcgcccggaaccgatgtgggccgaattactggctcttgcagcgtctgcccagggacgtgtgtatcgcgcggaagaccctcatggtgcgctccgcggcctcttcgaagtccgtggactccttgccaaagacttagctgttgttgcattgcgcgaaggtcttgatttacctccgactgatgatccaatgcttcttgcgtacctcttggacccgtcaaacacgacgcccgaaggcgtagcccgtcgttacggcggcgagtggaccgaagatgcagcgaaacgcgcgttattggccgaacgtttgcacgaaaatttattaggacgtttgcaaggcgaggaacgtctcctctggctttacgaagaagtggagaaaccattgagtcgcgtgctcgcgcatatggaagctaccggtgtcaaattagacgtggcgtatttggagaatctcagccttgaagttgctgcccacatgcgccgcttggaggaagaagtattccgtttagcaggccgttcctttcgccttaactctcgcgatcagttagaacgtgtgttgttcgatgaacttggtctccctcctatcggcaagacagagaagaccggtaaacgtagcacttcagcggcggttttagaagctcttcgcgaagtccatcccattctggacaagatcttgcagtaccgcgaaatggcgaaattgaaaggcacctatattgaccgtcttccggcattagtccacccgaaaacgggacgcctccatacccgcttcaaccaaacagccacggcgaccggtcgtttgtcctcctctgatccaaaccttcagaatattccagtacgtaccccattgggccagaagatccgccgtgcgtttgtagctgaggagggttggcgtttagtggccctcgattatcgtcaaattgaattacgtgtccttgcccatctttctggcgatgagaacctcatccgcgtgtttcaggaaggcaaagacattcacactcaaacggcaagctggatgtttggattatcagctgaagcgatcgatcctttgatgcgtcgtgcagcgaagaccatcaatttcggtgttctctacggtatgagtgcctttcgtttgtcgcaggaattaggcattccctatgaagaagctcaggcgttcattcagaaatactttcaaagctatcccaaagttaaagcatggatcgagaagactctccgtgaaggccgcacacgtggttacgtagagaccttatttggacgtcgccgctatgttcccgatttaaacgctcgcgtgaaaggcaagcgtgaagccgccgaacgcatggcgttcaacatgcctgtacagggcacggcagctgacctcatgaaacttgcaatggtgcgcctttttccacaattgcgtgaagttggtgcccgcatgctcttgcaggtccacgatgaactcttgttagaagcgccaaaagagcgtgcggaagaggtggcagccctcgcgaaagaagttatggaaggcgtgtggcccttagcggtgcctcttgaagtcgaagttggtattggcgaggattggctggctgccaaagga

SEQ ID NO: 6406 - protein, 841 aa, synthetic construct
  REGION 1..841: note = Variant of DNA polymerase I from Thermus sp. strain 2.9
MHHHHHHGGSGVLPVFEPKGRVLLVDGHHLAYRNFFALKGLTTSLGEPVQGVYGFAKSLLKALKEDGDVVIVVFDAKAPSFRHEAYEAYKAGRAPTPEDFPRQLALMKELVDLLGLERLEVPGFEADDVLATLAKKAEREGYEVQILTADRDLFQLLSPRISVLHPEGHRITPEWLWEKYGLRPEQWVDFRALAGDPSDNIPGVKGIGEKTALKLLKEWGSLENLLKNLDQVKPESVREKILAHLEDLKLSRELSRVRTDLPLEVDFGRRREPDWEGLKAFLERLEFGSLLHEFGLLESPLLAEEAPWPPPEGSFLGYRLSRPEPMWAELLALAASAQGRVYRAEDPHGALRGLFEVRGLLAKDLAVVALREGLDLPPTDDPMLLAYLLDPSNTTPEGVARRYGGEWTEDAAKRALLAERLHENLLGRLQGEERLLWLYEEVEKPLSRVLAHMEATGVKLDVAYLENLSLEVAAHMRRLEEEVFRLAGRSFRLNSRDQLERVLFDELGLPPIGKTEKTGKRSTSAAVLEALREVHPILDKILQYREMAKLKGTYIDRLPALVHPKTGRLHTRFNQTATATGRLSSSDPNLQNIPVRTPLGQKIRRAFVAEEGWRLVALDYRQIELRVLAHLSGDENLIRVFQEGKDIHTQTASWMFGLSAEAIDPLMRRAAKTINFGVLYGMSAFRLSQELGIPYEEAQAFIQKYFQSYPKVKAWIEKTLREGRTRGYVETLFGRRRYVPDLNARVKGKREAAERMAFNMPVQGTAADLMKLAMVRLFPQLREVGARMLLQVHDELLLEAPKERAEEVAALAKEVMEGVWPLAVPLEVEVGIGEDWLAAKG

SEQ ID NO: 6407 - DNA, 2523 bp, synthetic construct
  misc_feature 1..2523: note = Variant of DNA polymerase I from Thermus sp. strain 2.9
  source 1..2523: mol_type = other DNA
atgcaccatcatcatcatcatggcggtagcggcgtgttaccggtgttcgagcctaaaggtcgcgtgcttctggttgatggccatcatctcgcgtatcgtaacttctttgccctgaaaggattaaccaccagcctgggcgagccggtacagggtgtctacggctttgcaaagtcgctcctgaaagctctgaaagaagacggtgatgtggtgattgttgtctttgatgcgaaagcgccaagttttcgccacgaagcgtacgaagcttacaaagccgggcgtgctccaacgccggaagactttcctcgccaattggcgcttatgaaggaattagtggatttgcttggcctcgaacgcttggaagttcccggtttcgaggcagacgacgtattagcgactctcgcaaagaaagccgaacgtgagggctatgaagtccagatcttgacagcagatcgcgatcttttccagcttttatctccgcgcatctcggtgttacacccggaagggcatcgtatcaccccggaatggctctgggagaaatatggtttgcgtcccgaacaatgggtggattttcgcgccttagcaggcgatccgagcgacaatattccgggagttaaaggtatcggcgagaagacggcgctcaagctccttaaagaatgggggtcgttggagaacttgcttaagaatttagatcaggtcaaaccagagtcagtgcgtgagaagattcttgctcacctcgaagacctcaaattaagccgcgaattgtcccgtgtacgcaccgatttgccgctcgaagttgatttcggtcgccgccgcgaacctgactgggagggtcttaaagcgtttttagagcgtcttgaatttggttcgctcttgcatgaattcggccttttagaaagcccgttactggccgaagaagcaccttggccaccgcccgagggcgcgtttttaggttaccgtttgagtcgcccggaaccgatgtgggccgaattactggctcttgcagcgtctgcccagggacgtgtgtatcgcgcggaagaccctcatggtgcgctccgcggcctcttcgaagtccgtggactccttgccaaagacttagctgttgttgcattgcgcgaaggtcttgatttacctccgactgatgatccaatgcttcttgcgtacctcttggacccgtcaaacacgacgcccgaaggcgtagcccgtcgttacggcggcgagtggaccgaagatgcagcgaaacgcgcgttattggccgaacgtttgcacgaaaatttattaggacgtttgcaaggcgaggaacgtctcctctggctttacgaagaagtggagaaaccattgagtcgcgtgctcgcgcatatggaagctaccggtgtcaaattagacgtggcgtatttggagaatctcagccttgaagttgctgcccacatgcgccgcttggaggaagaagtattccgtttagcaggccgttcctttcgccttaactctcgcgatcagttagaacgtgtgttgttcgatgaacttggtctccctcctatcggcaagacagagaagaccggtaaacgtagcacttcagcggcggttttagaagctcttcgcgaagtccatcccattgtggacaagatcttgcagtaccgcgaaatggcgaaattgaaaggcacctatattgaccgtcttccggcattagtccacccgaaaacgggacgcctccatacccgcttcaaccaaacagccacggcgaccggtcgtttgtcctcctctgatccaaaccttcagaatattccagtacgtaccccattgggccagaagatccgccgtgcgtttgtagctgaggagggttggcgtttagtggccctcgattatcgtcaaattgaattacgtgtccttgcccatctttctggcgatgagaacctcatccgcgtgtttcaggaaggcaaagacattcacactcaaacggcaagctggatgtttggattatcagctgaagcgatcgatcctttgatgcgtcgtgcagcgaagaccatcaatttcggtgttctctacggtatgagtgcctttcgtttgtcgcaggaattaggcattccctatgaagaagctcaggcgttcattcagaaatactttcaaagctatcccaaagttaaagcatggatcgagaagactctccgtgaaggccgcacacgtggttacgtagagaccttatttggacgtcgccgctatgttcccgatttaaacgctcgcgtgaaaggcaagcgtgaagccgccgaacgcatggcgttcaacatgcctgtacagggcacggcagctgacctcatgaaacttgcaatggtgcgcgtgtttccacaattgcgtgaagttggtgcccgcatgctcttgcaggtccacgatgaactcttgttagaagcgccaaaagagcgtgcggaagaggtggcagccctcgcgaaagaagttatggaaggcgtgtggcccttagcggtgcctcttgaagtcgaagttggtattggcgaggattggctggctgccaaagga

SEQ ID NO: 6408 - protein, 841 aa, synthetic construct
  REGION 1..841: note = Variant of DNA polymerase I from Thermus sp. strain 2.9
MHHHHHHGGSGVLPVFEPKGRVLLVDGHHLAYRNFFALKGLTTSLGEPVQGVYGFAKSLLKALKEDGDVVIVVFDAKAPSFRHEAYEAYKAGRAPTPEDFPRQLALMKELVDLLGLERLEVPGFEADDVLATLAKKAEREGYEVQILTADRDLFQLLSPRISVLHPEGHRITPEWLWEKYGLRPEQWVDFRALAGDPSDNIPGVKGIGEKTALKLLKEWGSLENLLKNLDQVKPESVREKILAHLEDLKLSRELSRVRTDLPLEVDFGRRREPDWEGLKAFLERLEFGSLLHEFGLLESPLLAEEAPWPPPEGAFLGYRLSRPEPMWAELLALAASAQGRVYRAEDPHGALRGLFEVRGLLAKDLAVVALREGLDLPPTDDPMLLAYLLDPSNTTPEGVARRYGGEWTEDAAKRALLAERLHENLLGRLQGEERLLWLYEEVEKPLSRVLAHMEATGVKLDVAYLENLSLEVAAHMRRLEEEVFRLAGRSFRLNSRDQLERVLFDELGLPPIGKTEKTGKRSTSAAVLEALREVHPIVDKILQYREMAKLKGTYIDRLPALVHPKTGRLHTRFNQTATATGRLSSSDPNLQNIPVRTPLGQKIRRAFVAEEGWRLVALDYRQIELRVLAHLSGDENLIRVFQEGKDIHTQTASWMFGLSAEAIDPLMRRAAKTINFGVLYGMSAFRLSQELGIPYEEAQAFIQKYFQSYPKVKAWIEKTLREGRTRGYVETLFGRRRYVPDLNARVKGKREAAERMAFNMPVQGTAADLMKLAMVRVFPQLREVGARMLLQVHDELLLEAPKERAEEVAALAKEVMEGVWPLAVPLEVEVGIGEDWLAAKG

SEQ ID NO: 6409 - DNA, 2523 bp, synthetic construct
  misc_feature 1..2523: note = Variant of DNA polymerase I from Thermus sp. strain 2.9
  source 1..2523: mol_type = other DNA
atgcaccatcatcatcatcatggcggtagcggcgtgttaccggtgttcgagcctaaaggtcgcgtgcttctggttgatggccatcatctcgcgtatcgtaacttctttgccctgaaaggattaaccaccagcctgggcgagccggtacagggtgtctacggctttgcaaagtcgctcctgaaagctctgaaagaagacggtgatgtggtgattgttgtctttgatgcgaaagcgccaagttttcgccacgaagcgtacgaagcttacaaagccgggcgtgctccaacgccggaagactttcctcgccaattggcgcttatgaaggaattagtggatttgcttggcctcgaacgcttggaagttcccggtttcgaggcagacgacgtattagcgactctcgcaaagaaagccgaacgtgagggctatgaagtccagatcttgacagcagatcgcgatcttttccagcttttatctccgcgcatctcggtgttacacccggaagggcatcgtatcaccccggaatggctctgggagaaatatggtttgcgtcccgaacaatgggtggattttcgcgccttagcaggcgatccgagcgacaatattccgggagttaaaggtatcggcgagaagacggcgctcaagctccttaaagaatgggggtcgttggagaacttgcttaagaatttagatcaggtcaaaccagagtcagtgcgtgagaagattcttgctcacctcgaagacctcaaattaagccgcgaattgtcccgtgtacgcaccgatttgccgctcgaagttgatttcggtcgccgccgcgaacctgactgggagggtcttaaagcgtttttagagcgtcttgaatttggttcgctcttgcatgaattcggccttttagaaagcccgttactggccgaagaagcaccttggccaccgcccgagggcgcgtttttaggttaccgtttgagtcgcccggaaccgatgtgggccgaattactggctcttgcagcgtctgcccagggacgtgtgtatcgcgcggaagaccctcatggtgcgctccgcggcctcttcgaagtccgtggactccttgccaaagacttagctgttgttgcattgcgcgaaggtcttgatttacctccgactgatgatccaatgcttcttgcgtacctcttggacccgtcaaacacgacgcccgaaggcgtagcccgtcgttacggcggcgagtggaccgaagatgcagcgaaacgcgcgttattggccgaacgtttgcacgaaaatttattaggacgtttgcaaggcgaggaacgtctcctctggctttacgaagaagtggagaaaccattgagtcgcgtgctcgcgcatatggaagctaccggtgtcaaattagacgtggcgtatttggagaatctcagccttgaagttgctgcccacatgcgccgcttggaggaagaagtattccgtttagcaggccgttcctttcgccttaactctcgcgatcagttagaacgtgtgttgttcgatgaacttggtctccctcctatcggcaagacagagaagaccggtaaacgtagcacttcagcggcggttttagaagctcttcgcgaagtccatcccattgtggacaagatcttgcagtaccgcgaaatggcgaaattgaaaggcacctatattgaccgtcttccggcattagtccacccgaaaacgggacgcctccatacccgcttcaaccaaacagccacggcgaccggtcgtttgtcctcctctgatccaaaccttcagaatattccagtacgtaccccattgggccagaagatccgccgtgcgtttgtagctgaggagggttggcgtttagtggccctcgattatcgtcaaattgaattacgtgtccttgcccatctttctggcgatgagaacctcatccgcgtgtttcaggaaggcaaagacattcacactcaaacggcaagctggatgtttggattatcagctgaagcgatcgatcctttgatgcgtcgtgcagcgaagaccatcaatttcggtgttctctacggtatgagtgcctttcgtttgtcgcaggaattaggcattccctatgaagaagctcagtatttcattcagaaatactttcaaagctatcccaaagttaaagcatggatcgagaagactctccgtgaaggccgcacacgtggttacgtagagaccttatttggacgtcgccgctatgttcccgatttaaacgctcgcgtgaaaggcaagcgtgaagccgccgaacgcatggcgttcaacatgcctgtacagggcacggcagctgacctcatgaaacttgcaatggtgcgcctttttccacaattgcgtgaagttggtgcccgcatgctcttgcaggtccacgatgaactcttgttagaagcgccaaaagagcgtgcggaagaggtggcagccctcgcgaaagaagttatggaaggcgtgtggcccttagcggtgcctcttgaagtcgaagttggtattggcgaggattggctggctgccaaagga

SEQ ID NO: 6410 - protein, 841 aa, synthetic construct
  REGION 1..841: note = Variant of DNA polymerase I from Thermus sp. strain 2.9
MHHHHHHGGSGVLPVFEPKGRVLLVDGHHLAYRNFFALKGLTTSLGEPVQGVYGFAKSLLKALKEDGDVVIVVFDAKAPSFRHEAYEAYKAGRAPTPEDFPRQLALMKELVDLLGLERLEVPGFEADDVLATLAKKAEREGYEVQILTADRDLFQLLSPRISVLHPEGHRITPEWLWEKYGLRPEQWVDFRALAGDPSDNIPGVKGIGEKTALKLLKEWGSLENLLKNLDQVKPESVREKILAHLEDLKLSRELSRVRTDLPLEVDFGRRREPDWEGLKAFLERLEFGSLLHEFGLLESPLLAEEAPWPPPEGAFLGYRLSRPEPMWAELLALAASAQGRVYRAEDPHGALRGLFEVRGLLAKDLAVVALREGLDLPPTDDPMLLAYLLDPSNTTPEGVARRYGGEWTEDAAKRALLAERLHENLLGRLQGEERLLWLYEEVEKPLSRVLAHMEATGVKLDVAYLENLSLEVAAHMRRLEEEVFRLAGRSFRLNSRDQLERVLFDELGLPPIGKTEKTGKRSTSAAVLEALREVHPIVDKILQYREMAKLKGTYIDRLPALVHPKTGRLHTRFNQTATATGRLSSSDPNLQNIPVRTPLGQKIRRAFVAEEGWRLVALDYRQIELRVLAHLSGDENLIRVFQEGKDIHTQTASWMFGLSAEAIDPLMRRAAKTINFGVLYGMSAFRLSQELGIPYEEAQYFIQKYFQSYPKVKAWIEKTLREGRTRGYVETLFGRRRYVPDLNARVKGKREAAERMAFNMPVQGTAADLMKLAMVRLFPQLREVGARMLLQVHDELLLEAPKERAEEVAALAKEVMEGVWPLAVPLEVEVGIGEDWLAAKG

SEQ ID NO: 6411 - DNA, 2523 bp, synthetic construct
  misc_feature 1..2523: note = Variant of DNA polymerase I from Thermus sp. strain 2.9
  source 1..2523: mol_type = other DNA
atgcaccatcatcatcatcatggcggtagcggcgtgttaccggtgttcgagcctaaaggtcgcgtgcttctggttgatggccatcatctcgcgtatcgtaacttctttgccctgaaaggattaaccaccagcctgggcgagccggtacagggtgtctacggctttgcaaagtcgctcctgaaagctctgaaagaagacggtgatgtggtgattgttgtctttgatgcgaaagcgccaagttttcgccacgaagcgtacgaagcttacaaagccgggcgtgctccaacgccggaagactttcctcgccaattggcgcttatgaaggaattagtggatttgcttggcctcgaacgcttggaagttcccggtttcgaggcagacgacgtattagcgactctcgcaaagaaagccgaacgtgagggctatgaagtccagatcttgacagcagatcgcgatcttttccagcttttatctccgcgcatctcggtgttacacccggaagggcatcgtatcaccccggaatggctctgggagaaatatggtttgcgtcccgaacaatgggtggattttcgcgccttagcaggcgatccgagcgacaatattccgggagttaaaggtatcggcgagaagacggcgctcaagctccttaaagaatgggggtcgttggagaacttgcttaagaatttagatcaggtcaaaccagagtcagtgcgtgagaagattcttgctcacctcgaagacctcaaattaagccgcgaattgtcccgtgtacgcaccgatttgccgctcgaagttgatttcggtcgccgccgcgaacctgactgggagggtcttaaagcgtttttagagcgtcttgaatttggttcgctcttgcatgaattcggccttttagaaagcccgttactggccgaagaagcaccttggccaccgcccgagggcgcgtttttaggttaccgtttgagtcgcccggaaccgatgtgggccgaattactggctcttgcagcgtctgcccagggacgtgtgtatcgcgcggaagaccctcatggtgcgctccgcggcctcttcgaagtccgtggactccttgccaaagacttagctgttgttgcattgcgcgaaggtcttgatttacctccgactgatgatccaatgcttagggcgtacctcttggacccgtcaaacacgacgcccgaaggcgtagcccgtcgttacggcggcgagtggaccgaagatgcagcgaaacgcgcgttattggccgaacgtttgcacgaaaatttattaggacgtttgcaaggcgaggaacgtctcctctggctttacgaagaagtggagaaaccattgagtcgcgtgctcgcgcatatggaagctaccggtgtcaaattagacgtggcgtatttggagaatctcagccttgaagttgctgcccacatgcgccgcttggaggaagaagtattccgtttagcaggccgttcctttcgccttaactctcgcgatcagttagaacgtgtgttgttcgatgaacttggtctccctcctatcggcaagacagagaagaccggtaaacgtagcacttcagcggcggttttagaagctcttcgcgaagtccatcccattgtggacaagatcttgcagtaccgcgaaatggcgaaattgaaaggcacctatattgaccgtcttccggcattagtccacccgaaaacgggacgcctccatacccgcttcaaccaaacagccacggcgaccggtcgtttgtcctcctctgatccaaaccttcagaatattccagtacgtaccccattgggccagaagatccgccgtgcgtttgtagctgaggagggttggcgtttagtggccctcgattatcgtcaaattgaattacgtgtccttgcccatctttctggcgatgagaacctcatccgcgtgtttcaggaaggcaaagacattcacactcaaacggcaagctggatgtttggattatcagctgaagcgatcgatcctttgatgcgtcgtgcagcgaagaccatcaatttcggtgttctctacggtatgagtgcctttcgtttgtcgcaggaattaggcattccctatgaagaagctcaggcgttcattcagaaatactttcaaagctatcccaaagttaaagcatggatcgagaagactctccgtgaaggccgcacacgtggttacgtagagaccttatttggacgtcgccgctatgttcccgatttaaacgctcgcgtgaaaggcaagcgtgaagccgccgaacgcatggcgttcaacatgcctgtacagggcacggcagctgacctcatgaaacttgcaatggtgcgcctttttccacaattgcgtgaagttggtgcccgcatgctcttgcaggtccacgatgaactcttgttagaagcgccaaaagagcgtgcggaagaggtggcagccctcgcgaaagaagttatggaaggcgtgtggcccttagcggtgcctcttgaagtcgaagttggtattggcgaggattggctggctgccaaagga

SEQ ID NO: 6412 - protein, 841 aa, synthetic construct
  REGION 1..841: note = Variant of DNA polymerase I from Thermus sp. strain 2.9
MHHHHHHGGSGVLPVFEPKGRVLLVDGHHLAYRNFFALKGLTTSLGEPVQGVYGFAKSLLKALKEDGDVVIVVFDAKAPSFRHEAYEAYKAGRAPTPEDFPRQLALMKELVDLLGLERLEVPGFEADDVLATLAKKAEREGYEVQILTADRDLFQLLSPRISVLHPEGHRITPEWLWEKYGLRPEQWVDFRALAGDPSDNIPGVKGIGEKTALKLLKEWGSLENLLKNLDQVKPESVREKILAHLEDLKLSRELSRVRTDLPLEVDFGRRREPDWEGLKAFLERLEFGSLLHEFGLLESPLLAEEAPWPPPEGAFLGYRLSRPEPMWAELLALAASAQGRVYRAEDPHGALRGLFEVRGLLAKDLAVVALREGLDLPPTDDPMLRAYLLDPSNTTPEGVARRYGGEWTEDAAKRALLAERLHENLLGRLQGEERLLWLYEEVEKPLSRVLAHMEATGVKLDVAYLENLSLEVAAHMRRLEEEVFRLAGRSFRLNSRDQLERVLFDELGLPPIGKTEKTGKRSTSAAVLEALREVHPIVDKILQYREMAKLKGTYIDRLPALVHPKTGRLHTRFNQTATATGRLSSSDPNLQNIPVRTPLGQKIRRAFVAEEGWRLVALDYRQIELRVLAHLSGDENLIRVFQEGKDIHTQTASWMFGLSAEAIDPLMRRAAKTINFGVLYGMSAFRLSQELGIPYEEAQAFIQKYFQSYPKVKAWIEKTLREGRTRGYVETLFGRRRYVPDLNARVKGKREAAERMAFNMPVQGTAADLMKLAMVRLFPQLREVGARMLLQVHDELLLEAPKERAEEVAALAKEVMEGVWPLAVPLEVEVGIGEDWLAAKG

SEQ ID NO: 6413 - DNA, 2523 bp, synthetic construct
  misc_feature 1..2523: note = Variant of DNA polymerase I from Thermus sp. strain 2.9
  source 1..2523: mol_type = other DNA
atgcaccatcatcatcatcatggcggtagcggcgtgttaccggtgttcgagcctaaaggtcgcgtgcttctggttgatggccatcatctcgcgtatcgtaacttctttgccctgaaaggattaaccaccagcctgggcgagccggtacagggtgtctacggctttgcaaagtcgctcctgaaagctctgaaagaagacggtgatgtggtgattgttgtctttgatgcgaaagcgccaagttttcgccacgaagcgtacgaagcttacaaagccgggcgtgctccaacgccggaagactttcctcgccaattggcgcttatgaaggaattagtggatttgcttggcctcgaacgcttggaagttcccggtttcgaggcagacgacgtattagcgactctcgcaaagaaagccgaacgtgagggctatgaagtccagatcttgacagcagatcgcgatcttttccagcttttatctccgcgcatctcggtgttacacccggaagggcatcgtatcaccccggaatggctctgggagaaatatggtttgcgtcccgaacaatgggtggattttcgcgccttagcaggcgatccgagcgacaatattccgggagttaaaggtatcggcgagaagacggcgctcaagctccttaaagaatgggggtcgttggagaacttgcttaagaatttagatcaggtcaaaccagagtcagtgcgtgagaagattcttgctcacctcgaagacctcaaattaagccgcgaattgtcccgtgtacgcaccgatttgccgctcgaagttgatttcggtcgccgccgcgaacctgactgggagggtcttaaagcgtttttagagcgtcttgaatttggttcgctcttgcatgaattcggccttttagaaagcccgttactggccgaagaagcaccttggccaccgcccgagggcgcgtttttaggttaccgtttgagtcgcccggaaccgatgtgggccgaattactggctcttgcagcgtctgcccagggacgtgtgtatcgcgcggaagaccctcatggtgcgctccgcggcctcttcgaagtccgtggactccttgccaaagacttagctgttgttgcattgcgcgaaggtcttgatttacctccgactgatgatccaatgcttcttgcgtacctcttggacccgtcaccgacgacgcccgaaggcgtagcccgtcgttacggcggcgagtggaccgaagatgcagcgaaacgcgcgttattggccgaacgtttgcacgaaaatttattaggacgtttgcaaggcgaggaacgtctcctctggctttacgaagaagtggagaaaccattgagtcgcgtgctcgcgcatatggaagctaccggtgtcaaattagacgtggcgtatttggagaatctcagccttgaagttgctgcccacatgcgccgcttggaggaagaagtattccgtttagcaggccgttcctttcgccttaactctcgcgatcagttagaacgtgtgttgttcgatgaacttggtctccctcctatcggcaagacagagaagaccggtaaacgtagcacttcagcggcggttttagaagctcttcgcgaagtccatcccattgtggacaagatcttgcagtaccgcgaaatggcgaaattgaaaggcacctatattgaccgtcttccggcattagtccacccgaaaacgggacgcctccatacccgcttcaaccaaacagccacggcgaccggtcgtttgtcctcctctgatccaaaccttcagaatattccagtacgtaccccattgggccagaagatccgccgtgcgtttgtagctgaggagggttggcgtttagtggccctcgattatcgtcaaattgaattacgtgtccttgcccatctttctggcgatgagaacctcatccgcgtgtttcaggaaggcaaagacattcacactcaaacggcaagctggatgtttggattatcagctgaagcgatcgatcctttgatgcgtcgtgcagcgaagaccatcaatttcggtgttctctacggtatgagtgcctttcgtttgtcgcaggaattaggcattccctatgaagaagctcaggcgttcattcagaaatactttcaaagctatcccaaagttaaagcatggatcgagaagactctccgtgaaggccgcacacgtggttacgtagagaccttatttggacgtcgccgctatgttcccgatttaaacgctcgcgtgaaaggcaagcgtgaagccgccgaacgcatggcgttcaacatgcctgtacagggcacggcagctgacctcatgaaacttgcaatggtgcgcctttttccacaattgcgtgaagttggtgcccgcatgctcttgcaggtccacgatgaactcttgttagaagcgccaaaagagcgtgcggaagaggtggcagccctcgcgaaagaagttatggaaggcgtgtggcccttagcggtgcctcttgaagtcgaagttggtattggcgaggattggctggctgccaaagga

SEQ ID NO: 6414 - protein, 841 aa, synthetic construct
  REGION 1..841: note = Variant of DNA polymerase I from Thermus sp. strain 2.9
MHHHHHHGGSGVLPVFEPKGRVLLVDGHHLAYRNFFALKGLTTSLGEPVQGVYGFAKSLLKALKEDGDVVIVVFDAKAPSFRHEAYEAYKAGRAPTPEDFPRQLALMKELVDLLGLERLEVPGFEADDVLATLAKKAEREGYEVQILTADRDLFQLLSPRISVLHPEGHRITPEWLWEKYGLRPEQWVDFRALAGDPSDNIPGVKGIGEKTALKLLKEWGSLENLLKNLDQVKPESVREKILAHLEDLKLSRELSRVRTDLPLEVDFGRRREPDWEGLKAFLERLEFGSLLHEFGLLESPLLAEEAPWPPPEGAFLGYRLSRPEPMWAELLALAASAQGRVYRAEDPHGALRGLFEVRGLLAKDLAVVALREGLDLPPTDDPMLLAYLLDPSPTTPEGVARRYGGEWTEDAAKRALLAERLHENLLGRLQGEERLLWLYEEVEKPLSRVLAHMEATGVKLDVAYLENLSLEVAAHMRRLEEEVFRLAGRSFRLNSRDQLERVLFDELGLPPIGKTEKTGKRSTSAAVLEALREVHPIVDKILQYREMAKLKGTYIDRLPALVHPKTGRLHTRFNQTATATGRLSSSDPNLQNIPVRTPLGQKIRRAFVAEEGWRLVALDYRQIELRVLAHLSGDENLIRVFQEGKDIHTQTASWMFGLSAEAIDPLMRRAAKTINFGVLYGMSAFRLSQELGIPYEEAQAFIQKYFQSYPKVKAWIEKTLREGRTRGYVETLFGRRRYVPDLNARVKGKREAAERMAFNMPVQGTAADLMKLAMVRLFPQLREVGARMLLQVHDELLLEAPKERAEEVAALAKEVMEGVWPLAVPLEVEVGIGEDWLAAKG

SEQ ID NO: 6415 - DNA, 2523 bp, synthetic construct
  misc_feature 1..2523: note = Variant of DNA polymerase I from Thermus sp. strain 2.9
  source 1..2523: mol_type = other DNA
atgcaccatcatcatcatcatggcggtagcggcgtgttaccggtgttcgagcctaaaggtcgcgtgcttctggttgatggccatcatctcgcgtatcgtaacttctttgccctgaaaggattaaccaccagcctgggcgagccggtacagggtgtctacggctttgcaaagtcgctcctgaaagctctgaaagaagacggtgatgtggtgattgttgtctttgatgcgaaagcgccaagttttcgccacgaagcgtacgaagcttacaaagccgggcgtgctccaacgccggaagactttcctcgccaattggcgcttatgaaggaattagtggatttgcttggcctcgaacgcttggaagttcccggtttcgaggcagacgacgtattagcgactctcgcaaagaaagccgaacgtgagggctatgaagtccagatcttgacagcagatcgcgatcttttccagcttttatctccgcgcatctcggtgttacacccggaagggcatcgtatcaccccggaatggctctgggagaaatatggtttgcgtcccgaacaatgggtggattttcgcgccttagcaggcgatccgagcgacaatattccgggagttaaaggtatcggcgagaagacggcgctcaagctccttaaagaatgggggtcgttggagaacttgcttaagaatttagatcaggtcaaaccagagtcagtgcgtgagaagattcttgctcacctcgaagacctcaaattaagccgcgaattgtcccgtgtacgcaccgatttgccgctcgaagttgatttcggccgccgccgcgaacctgactgggagggtcttaaagcgtttttagagcgtcttgaatttggttcgctcttgcatgaattcggccttttagaaagcccgttactggccgaagaagcaccttggccaccgcccgagggcgcgtttttaggttaccgtttgagtcgcccggaaccgatgtgggccgaattactggctcttgcagcgtctgcccagggacgtgtgtatcgcgcggaagaccctcatggtgcgctccgcggcctcttcgaagtccgtggactccttgccaaagacttagctgttgttgcattgcgcgaaggtcttgatttacctccgactgatgatccaatgcttcttgcgtacctcttggacccgtcaaacacgacgcccgaaggcgtagcccgtcgttacggcggcgagtggaccgaagatgcagcgaaacgcgcgttattggccgaacgtttgcacgcaaatttattaggacgtttgcaaggcgaggaacgtctcctctggctttacgaagaagtggagaaaccattgagtcgcgtgctcgcgcatatggaagctaccggtgtcaaattagacgtggcgtatttggagaatcttagccttgaagttgctgcccacatgcgccgcttggaggaagaagtattccgtttagcaggccgttcctttcgccttaactctcgcgatcagttagaacgtgtgttgttcgatgaacttggtctccctcctatcggcaagacagagaagaccggtaaacgtagcacttcagcggcggttttagaagctcttcgcgaagtccatcccattgtggacaagatcttgcagtaccgcgaaatggcgaaattgaaaggcacctatattgaccgtcttccggcattagtccacccgaaaacgggacgcctccatacccgcttcaaccaaacagccacggcgaccggtcgtttgtcctcctctgatccaaaccttcagaatattccagtacgtaccccattgggccagaagatccgccgtgcgtttgtagctgaggagggttggcgtttagtggccctcgattatcgtcaaattgaattacgtgtccttgcccatctttctggcgatgagaacctcatccgcgtgtttcaggaaggcaaagacattcacactcaaacggcaagctggatgtttggattatcagctgaagcgatcgatcctttgatgcgtcgtgcagcgaagaccatcaatttcggtgttctctacggtatgagtgcctttcgtttgtcgcaggaattaggcattccctatgaagaagctcaggcgttcattcagaaatactttcaaagctatcccaaagttaaagcatggatcgagaagactctccgtgaaggccgcacacgtggttacgtagagaccttatttggacgtcgccgctatgttcccgatttaaacgctcgcgtgaaaggcaagcgtgaagccgccgaacgcatggcgttcaacatgcctgtacagggcacggcagctgacctcatgaaacttgcaatggtgcgcctttttccacaattgcgtgaagttggtgcccgcatgctcttgcaggtccacgatgaactcttgttagaagcgccaaaagagcgtgcggaagaggtggcagccctcgcgaaagaagttatggaaggcgtgtggcccttagcggtgcctcttgaagtcgaagttggtattggcgaggattggctggctgccaaagga

SEQ ID NO: 6416 - protein, 841 aa, synthetic construct; identical to SEQ ID NO: 4338
  REGION 1..841: note = Variant of DNA polymerase I from Thermus sp. strain 2.9

SEQ ID NO: 6417 - DNA, 2523 bp, synthetic construct
  misc_feature 1..2523: note = Variant of DNA polymerase I from Thermus sp. strain 2.9
  source 1..2523: mol_type = other DNA
atgcaccatcatcatcatcatggcggtagcggcgtgttaccggtgttcgagcctaaaggtcgcgtgcttctggttgatggccatcatctcgcgtatcgtaacttctttgccctgaaaggattaaccaccagccgcggcgagccggtacagggtgtctacggctttgcaaagtcgctcctgaaagctctgaaagaagacggtgatgtggtgattgttgtctttgatgcgaaagcgccaagttttcgccacgaagcgtacgaagcttacaaagccgggcgtgctccaacgccggaagactttcctcgccaattggcgcttatgaaggaattagtggatttgcttggcctcgaacgcttggaagttcccggtttcgaggcagacgacgtattagcgactctcgcaaagaaagccgaacgtgagggctatgaagtccagatcttgacagcagatcgcgatcttttccagcttttatctccgcgcatctcggtgttacacccggaagggcatcgtatcaccccggaatggctctgggagaaatatggtttgcgtcccgaacaatgggtggattttcgcgccttagcaggcgatccgagcgacaatattccgggagttaaaggtatcggcgagaagacggcgctcaagctccttaaagaatgggggtcgttggagaacttgcttaagaatttagatcaggtcaaaccagagtcagtgcgtgagaagattcttgctcacctcgaagacctcaaattaagccgcgaattgtcccgtgtacgcaccgatttgccgctcgaagttgatttcggccgccgccgcgaacctgactgggagggtcttaaagcgtttttagagcgtcttgaatttggttcgctcttgcatgaattcggccttttagaaagcccgttactggccgaagaagcaccttggccaccgcccgagggcgcgtttttaggttaccgtttgagtcgcccggaaccgatgtgggccgaattactggctcttgcagcgtctgcccagggacgtgtgtatcgcgcggaagaccctcatggtgcgctccgcggcctcttcgaagtccgtggactccttgccaaagacttagctgttgttgcattgcgcgaaggtcttgatttacctccgactgatgatccaatgcttcttgcgtacctcttggacccgtcaaacacgacgcccgaaggcgtagcccgtcgttacggcggcgagtggaccgaagatgcagcgaaacgcgcgttattggccgaacgtttgcacgaaaatttattaggacgtttgcaaggcgaggaacgtctcctctggctttacgaagaagtggagaaaccattgagtcgcgtgctcgcgcatatggaagctaccggtgtcaaattagacgtggcgtatttggaggcccttagccttgaagttgctgcccacatgcgccgcttggaggaagaagtattccgtttagcaggccgctcctttcgccttaactctcgcgatcagttagaacgtgtgttgttcgatgaacttggtctccctcctatcggcaagacagagaagaccggtaaacgtagcacttcagcggcggttttagaagctcttcgcgaagtccatcccattgtggacaagatcttgcagtaccgcgaaatggcgaaattgaaaggcacctatattgaccgtcttccggcattagtccacccgaaaacgggacgcctccatacccgcttcaaccaaacagccacggcgaccggtcgtttgtcctcctctgatccaaaccttcagaatattccagtacgtaccccattgggccagaagatccgccgtgcgtttgtagctgaggagggttggcgtttagtggccctcgattatcgtcaaattgaattacgtgtccttgcccatctttctggcgatgagaacctcatccgcgtgtttcaggaaggcaaagacattcacactcaaacggcaagctggatgtttggattatcagctgaagcgatcgatcctttgatgcgtcgtgcagcgaagaccatcaatttcggtgttctctacggtatgagtgcctttcgtttgtcgcaggaattaggcattccctatgaagaagctcaggcgttcattcagaaatactttcaaagctatcccaaagttaaagcatggatcgagaagactctccgcgaaggccgcacacgtggttacgtagagaccttatttggacgtcgccgctatgttcccgatttaaacgctcgcgtgaaaagcaaacgtgaagccgccgaacgcatggcgttcaacatgcctgtacagggcacggcagctgacctcatgaaacttgcaatggtgcgcctttttccacaattgcgtgaagttggtgcccgcatgctcttgcaggtccacgatgaactcttgttagaagcgccaaaagagcgtgcggaagaggtggcagccctcgcgaaagaagttatggaaggcgtgtggcccttagcggtgcctcttgaagtcgaagttggtattggcgaggattggctggctgccaaagga

SEQ ID NO: 6418 - protein, 841 aa, synthetic construct
  REGION 1..841: note = Variant of DNA polymerase I from Thermus sp. strain 2.9
MHHHHHHGGSGVLPVFEPKGRVLLVDGHHLAYRNFFALKGLTTSRGEPVQGVYGFAKSLLKALKEDGDVVIVVFDAKAPSFRHEAYEAYKAGRAPTPEDFPRQLALMKELVDLLGLERLEVPGFEADDVLATLAKKAEREGYEVQILTADRDLFQLLSPRISVLHPEGHRITPEWLWEKYGLRPEQWVDFRALAGDPSDNIPGVKGIGEKTALKLLKEWGSLENLLKNLDQVKPESVREKILAHLEDLKLSRELSRVRTDLPLEVDFGRRREPDWEGLKAFLERLEFGSLLHEFGLLESPLLAEEAPWPPPEGAFLGYRLSRPEPMWAELLALAASAQGRVYRAEDPHGALRGLFEVRGLLAKDLAVVALREGLDLPPTDDPMLLAYLLDPSNTTPEGVARRYGGEWTEDAAKRALLAERLHENLLGRLQGEERLLWLYEEVEKPLSRVLAHMEATGVKLDVAYLEALSLEVAAHMRRLEEEVFRLAGRSFRLNSRDQLERVLFDELGLPPIGKTEKTGKRSTSAAVLEALREVHPIVDKILQYREMAKLKGTYIDRLPALVHPKTGRLHTRFNQTATATGRLSSSDPNLQNIPVRTPLGQKIRRAFVAEEGWRLVALDYRQIELRVLAHLSGDENLIRVFQEGKDIHTQTASWMFGLSAEAIDPLMRRAAKTINFGVLYGMSAFRLSQELGIPYEEAQAFIQKYFQSYPKVKAWIEKTLREGRTRGYVETLFGRRRYVPDLNARVKSKREAAERMAFNMPVQGTAADLMKLAMVRLFPQLREVGARMLLQVHDELLLEAPKERAEEVAALAKEVMEGVWPLAVPLEVEVGIGEDWLAAKG

SEQ ID NO: 6419 - DNA, 2523 bp, synthetic construct
  misc_feature 1..2523: note = Variant of DNA polymerase I from Thermus sp. strain 2.9
  source 1..2523: mol_type = other DNA
atgcaccatcatcatcatcatggcggtagcggcgtgttaccggtgttcgagcctaaaggtcgcgtgcttctggttgatggccatcatctcgcgtatcgtaacttctttgccctgaaaggattaaccaccagcctgggcgagccggtacagggtgtctacggctttgcaaagtcgctcctgaaagctctgaaagaagacggtgatgtggtgattgttgtctttgatgcgaaagcgccaagttttcgccacgaagcgtacgaagcttacaaagccgggcgtgctccaacgccggaagactttcctcgccaattggcgcttatgaaggaattagtggatttgcttggcctcgaacgcttggaagttcccggtttcgaggcagacgacgtattagcgactctcgcaaagaaagccgaacgtgagggctatgaagtccagatcttgacagcagatcgcgatcttttccagcttttatctccgcgcatctcggtgttacacccggaagggcatcgtatcaccccggaatggctctgggagaaatatggtttgcgtcccgaacaatgggtggattttcgcgccttagcaggcgatccgagcgacaatattccgggagttaaaggtatcggcgagaagacggcgctcaagctccttaaagaatgggggtcgttggagaacttgcttaagaatttagatcaggtcaaaccagagtcagtgcgtgagaagattcttgctcacctcgaagacctcaaattaagccgcgaattgtcccgtgtacgcaccgatttgccgctcgaagttgatttcggtcgccgccgcgaacctgactgggagggtcttaaagcgtttttagagcgtcttgaatttggttcgctcttgcatgaattcggccttttagaaagcccgttactggccgaagaagcaccttggccaccgcccgagggcgcgtttttaggttaccgtttgagtcgcccggaaccgatgtgggccgaattactggctcttgcagcgtctgcccagggacgtgtgtatcgcgcggaagaccctcatggtgcgctccgcggcctcttcgaagtccgtggactccttgccaaagacttagctgttgttgcattgcgcgaaggtcttgatttacctccgactgatgatccaatgcttcttgcgtacctcttggacccgtcaaacacgacgcccgaaggcgtagcccgtcgttacggcggcgagtggaccgaagatgcagcgaaacgcgcgttattggccgaacgtttgcacgaaaatttattaggacgtttgcaaggcgaggaacgtctcctctggctttacgaagaagtggagaaaccattgagtcgcgtgctcgcgcatatggaagctaccggtgtcaaattagacgtggcgtatttggagaatctcagccttgaagttgctgcccacatgcgccgcttggaggaagaagtattccgtttagcaggccgttcctttcgccttaactctcgcgatcagttagaacgtgtgttgttcgatgaacttggtctccctcctatcggcaagacagagaagaccggtaaacgtagcacttcagcggcggttttagaagctcttcgcgaagtccatcccattgtggacaagatcttgcagtaccgcgaaatggcgaaattgaaaggcacctatattgaccgtcttccggcattagtccacccgaaaacgggacgcctccatacccgcttcaaccaaacagccacggcgaccggtcgtttgtcctcctctgatccaaaccttcagaatattccagtacgtaccccattgggccagaagatccgccgtgcgtttgtagctgaggagggttggcgtttagtggccctcgattatcgtcaaattgaattacgtgtccttgcccatctttctggcgatgagaacctcatccgcgtgtttcaggaaggcaaagacattcacactcaaacggcaagctggatgtttggattatcagctgaagcgatcgatcctttgatgcgtcgtgcagcgaagaccatcaatttcggtgttctctacggtatgagtgcctttcgtttgtcgcaggaattaggcattccctatgaagaagctcaggcgttcattcagaaatactttcaaagctatcccaaagttaaagcatggatcgagaagactctccgtgaagtgcgcacacgtggttacgtagagaccttatttggacgtcgccgctatgttcccgatttaaacgctcgcgtgaaaggcaagcgtgaagccgccgaacgcatggcgttcaacatgcctgtacagggcacggcagctgacctcatgaaacttgcaatggtgcgcctttttccacaattgcgtgaagttggtgcccgcatgctcttgcaggtccacgatgaactcttgttagaagcgccaaaagagcgtgcggaagaggtggcagccctcgcgaaagaagttatggaaggcgtgtggcccttagcggtgcctcttgaagtcgaagttggtattggcgaggattggctggctgccaaagga

SEQ ID NO: 6420 - protein, 841 aa, synthetic construct
  REGION 1..841: note = Variant of DNA polymerase I from Thermus sp. strain 2.9
MHHHHHHGGSGVLPVFEPKGRVLLVDGHHLAYRNFFALKGLTTSLGEPVQGVYGFAKSLLKALKEDGDVVIVVFDAKAPSFRHEAYEAYKAGRAPTPEDFPRQLALMKELVDLLGLERLEVPGFEADDVLATLAKKAEREGYEVQILTADRDLFQLLSPRISVLHPEGHRITPEWLWEKYGLRPEQWVDFRALAGDPSDNIPGVKGIGEKTALKLLKEWGSLENLLKNLDQVKPESVREKILAHLEDLKLSRELSRVRTDLPLEVDFGRRREPDWEGLKAFLERLEFGSLLHEFGLLESPLLAEEAPWPPPEGAFLGYRLSRPEPMWAELLALAASAQGRVYRAEDPHGALRGLFEVRGLLAKDLAVVALREGLDLPPTDDPMLLAYLLDPSNTTPEGVARRYGGEWTEDAAKRALLAERLHENLLGRLQGEERLLWLYEEVEKPLSRVLAHMEATGVKLDVAYLENLSLEVAAHMRRLEEEVFRLAGRSFRLNSRDQLERVLFDELGLPPIGKTEKTGKRSTSAAVLEALREVHPIVDKILQYREMAKLKGTYIDRLPALVHPKTGRLHTRFNQTATATGRLSSSDPNLQNIPVRTPLGQKIRRAFVAEEGWRLVALDYRQIELRVLAHLSGDENLIRVFQEGKDIHTQTASWMFGLSAEAIDPLMRRAAKTINFGVLYGMSAFRLSQELGIPYEEAQAFIQKYFQSYPKVKAWIEKTLREVRTRGYVETLFGRRRYVPDLNARVKGKREAAERMAFNMPVQGTAADLMKLAMVRLFPQLREVGARMLLQVHDELLLEAPKERAEEVAALAKEVMEGVWPLAVPLEVEVGIGEDWLAAKG

SEQ ID NO: 6421 - DNA, 2523 bp, synthetic construct
  misc_feature 1..2523: note = Variant of DNA polymerase I from Thermus sp. strain 2.9
  source 1..2523: mol_type = other DNA
atgcaccatcatcatcatcatggcggtagcggcgtgttaccggtgttcgagcctaaaggtcgcgtgcttctggttgatggccatcatctcgcgtatcgtaacttctttgccctgaaaggattaaccaccagcctgggcgagccggtacagggtgtctacggctttgcaaagtcgctcctgaaagctctgaaagaagacggtgatgtggtgattgttgtctttgatgcgaaagcgccaagttttcgccacgaagcgtacgaagcttacaaagccgggcgtgctccaacgccggaagactttcctcgccaattggcgcttatgaaggaattagtggatttgcttggcctcgaacgcttggaagttcccggtttcgaggcagacgacgtattagcgactctcgcaaagaaagccgaacgtgagggctatgaagtccagatcttgacagcagatcgcgatcttttccagcttttatctccgcgcatctcggtgttacacccggaagggcatcgtatcaccccggaatggctctgggagaaatatggtttgcgtcccgaacaatgggtggattttcgcgccttagcaggcgatccgagcgacaatattccgggagttaaaggtatcggcgagaagacggcgctcaagctccttaaagaatgggggtcgttggagaacttgcttaagaatttagatcaggtcaaaccagagtcagtgcgtgagaagattcttgctcacctcgaagacctcaaattaagccgcgaattgtcccgtgtacgcaccgatttgccgctcgaagttgatttcggccgccgccgcgaacctgactgggagggtcttaaagcgtttttagagcgtcttgaatttggttcgctcttgcatgaattcggccttttagaaagcccgttactggccgaagaagcaccttggccaccgcccgagggcgcgtttttaggttaccgtttgagtcgcccggaaccgatgtgggccgaattactggctcttgcagcgtctgcccagggacgtgtgtatcgcgcggaagaccctcatggtgcgctccgcggcctcttcgaagtccgtggactccttgccaaagacttagctgttgttgcattgcgcgaaggtcttgatttacctccgactgatgatccaatgcttcttgcgtacctcttggacccgtcaaacacgacgcccgaaggcgtagcccgtcgttacggcggcgagtggaccgaagatgcagcgaaacgcgcgttattggccgaacgtttgcacgaaaatttattaggacgtttgcaaggcgaggaacgtctcctctggctttacgaagaagtggagaaaccattgagtcgcgtgctcgcgcatatggaagctaccggtgtcaaattagacgtggcgtatttggaggcccttagccttgaagttgctgcccacatgcgccgcttggaggaagaagtattccgtttagcaggccactcctttcgccttaactctcgcgatcagttagaacgtgtgttgttcgatgaacttggtctccctcctatcggcaagacagagaagaccggtaaacgtagcacttcagcggcggttttagaagctcttcgcgaagtccatcccattgtggacaagatcttgcagtaccgcgaactggcgaaattgaaaggcacctatattgaccgtcttccggcattagtccacccgaaaacgggacgcctccatacccgcttcaaccaaacagccacggcgaccggtcgtttgtcctcctctgatccaaaccttcagaatattccagtacgtaccccattgggccagaagatccgccgtgcgtttgtagctgaggagggttggcgtttagtggccctcgattatagtcaaattgaattacgtgtccttgcccatctttctggcgatgagaacctcatccgcgtgtttcaggaaggcaaagacattcacactcaaacggcaagctggatgtttggattatcagctgaagcgatcgatcctttgatgcgtcgtgcagcgaagaccatcaatttcggtgttctctacggtatgagtgcctttcgtttgtcgcaggaattaggcattccctatgaagaagctcaggcgttcattcagaaatactttcaaagctatcccaaagttaaagcatggatcgagaagactctccgcgaaggccgcacacgtggttacgtagagaccttatttggacgtcgccgctatgttcccgatttaaacgctcgcgtgaaaagcaaacgtgaagccgccgaacgcatggcgttcaacatgcctgtacagggcacggcagctgacctcatgaaacttgcaatggtgcgcctttttccacaattgcgtgaagttggtgcccgcatgctcttgcaggtccacgatgaactcttgttagaagcgccaaaagagcgtgcggaagaggtggcagccctcgcgaaagaagttatggaaggcgtgtggcccttagcggtgcctcttgaagtcgaagttggtattggcgaggattggctggctgccaaagga

SEQ ID NO: 6422 - protein, 841 aa, synthetic construct
  REGION 1..841: note = Variant of DNA polymerase I from Thermus sp. strain 2.9
MHHHHHHGGSGVLPVFEPKGRVLLVDGHHLAYRNFFALKGLTTSLGEPVQGVYGFAKSLLKALKEDGDVVIVVFDAKAPSFRHEAYEAYKAGRAPTPEDFPRQLALMKELVDLLGLERLEVPGFEADDVLATLAKKAEREGYEVQILTADRDLFQLLSPRISVLHPEGHRITPEWLWEKYGLRPEQWVDFRALAGDPSDNIPGVKGIGEKTALKLLKEWGSLENLLKNLDQVKPESVREKILAHLEDLKLSRELSRVRTDLPLEVDFGRRREPDWEGLKAFLERLEFGSLLHEFGLLESPLLAEEAPWPPPEGAFLGYRLSRPEPMWAELLALAASAQGRVYRAEDPHGALRGLFEVRGLLAKDLAVVALREGLDLPPTDDPMLLAYLLDPSNTTPEGVARRYGGEWTEDAAKRALLAERLHENLLGRLQGEERLLWLYEEVEKPLSRVLAHMEATGVKLDVAYLEALSLEVAAHMRRLEEEVFRLAGHSFRLNSRDQLERVLFDELGLPPIGKTEKTGKRSTSAAVLEALREVHPIVDKILQYRELAKLKGTYIDRLPALVHPKTGRLHTRFNQTATATGRLSSSDPNLQNIPVRTPLGQKIRRAFVAEEGWRLVALDYSQIELRVLAHLSGDENLIRVFQEGKDIHTQTASWMFGLSAEAIDPLMRRAAKTINFGVLYGMSAFRLSQELGIPYEEAQAFIQKYFQSYPKVKAWIEKTLREGRTRGYVETLFGRRRYVPDLNARVKSKREAAERMAFNMPVQGTAADLMKLAMVRLFPQLREVGARMLLQVHDELLLEAPKERAEEVAALAKEVMEGVWPLAVPLEVEVGIGEDWLAAKG

SEQ ID NO: 6423 - DNA, 2523 bp, synthetic construct
  misc_feature 1..2523: note = Variant of DNA polymerase I from Thermus sp. strain 2.9
  source 1..2523: mol_type = other DNA
atgcaccatcatcatcatcatggcggtagcggcgtgttaccggtgttcgagcctaaaggtcgcgtgcttctggttgatggccatcatctcgcgtatcgtaacttctttgccctgaaaggattaaccaccagcctgggcgagccggtacagggtgtctacggctttgcaaagtcgctcctgaaagctctgaaagaagacggtgatgtggtgattgttgtctttgatgcgaaagcgccaagttttcgccacgaagcgtacgaagcttacaaagccgggcgtgctccaacgccggaagactttcctcgccaattggcgcttatgaaggaattagtggatttgcttggcctcgaacgcttggaagttcccggtttcgaggcagacgacgtattagcgactctcgcaaagaaagccgaacgtgagggctatgaagtccagatcttgacagcagatcgcgatcttttccagcttttatctccgcgcatctcggtgttacacccggaagggcatcgtatcaccccggaatggctctgggagaaatatggtttgcgtcccgaacaatgggtggattttcgcgccttagcaggcgatccgagcgacaatattccgggagttaaaggtatcggcgagaagacggcgctcaagctccttaaagaatgggggtcgttggagaacttgcttaagaatttagatcaggtcaaaccagagtcagtgcgtgagaagattcttgctcacctcgaagacctcaaattaagccgcgaattgtcccgtgtacgcaccgatttgccgctcgaagttgatttcggtcgccgccgcgaacctgactgggagggtcttaaagcgtttttagagcgtcttgaatttggttcgctcttgcatgaattcggccttttagaaagcccgttactggccgaagaagcaccttggccaccgcccgagggcgcgtttttaggttaccgtttgagtcgcccggaaccgatgtgggccgaattactggctcttgcagcgtctgcccagggacgtgtgtatcgcgcggaagaccctcatggtgcgctccgcggcctcttcgaagtccgtggactccttgccaaagacttagctgttgttgcattgcgcgaaggtcttgatttacctccgactgatgatccaatgcttcttgcgtacctcttggacccgtcaaacacgacgcccgaaggcgtagcccgtcgttacggcggcgagtggaccgaagatgcagcgaaacgcgcgttattggccgaacgtttgcacgaaaatttattaggacgtttgcaaggcgaggaacgtctcctctggctttacgaagaagtggagaaaccattgagtcgcgtgctcgcgcatatggaagctaccggtgtcaaattagacgtggcgtatttggagaatcttgagcttgaagttgctgcccacatgcgccgcttggaggaagaagtattccgtttagcaggccgttcctttcgccttaactctcgcgatcagttagaacgtgtgttgttcgatgaacttggtctccctcctatcggcaagacagagaagaccggtaaacgtagcacttcagcggcggttttagaagctcttcgcgaagtccatcccattgtggacaagatcttgcagtaccgcgaaatggcgaaattgaaaggcacctatattgaccgtcttccggcattagtccacccgaaaacgggacgcctccatacccgcttcaaccaaacagccacggcgaccggtcgtttgtcctcctctgatccaaaccttcagaatattccagtacgtaccccattgggccagaagatccgccgtgcgtttgtagctgaggagggttggcgtttagtggccctcgattatcgtcaaattgaattacgtgtccttgcccatctttctggcgatgagaacctcatccgcgtgtttcaggaaggcaaagacattcacactcaaacggcaagctggatgtttggattatcagctgaagcgatcgatcctttgatgcgtcgtgcagcgaagaccatcaatttcggtgttctctacggtatgagtgcctttcgtttgtcgcaggaattaggcattccctatgaagaagctcaggcgttcattcagaaatactttcaaagctatcccaaagttaaagcatggatcgagaagactctccgtgaaggccgcacacgtggttacgtagagaccttatttggacgtcgccgctatgttcccgatttaaacgctcgcgtgaaaggcaagcgtgaagccgccgaacgcatggcgttcaacatgcctgtacagggcacggcagctgacctcatgaaacttgcaatggtgcgcctttttccacaattgcgtgaagttggtgcccgcatgctcttgcaggtccacgatgaactcttgttagaagcgccaaaagagcgtgcggaagaggtggcagccctcgcgaaagaagttatggaaggcgtgtggcccttagcggtgcctcttgaagtcgaagttggtattggcgaggattggctggctgccaaagga

SEQ ID NO: 6424 - protein, 841 aa, synthetic construct
  REGION 1..841: note = Variant of DNA polymerase I from Thermus sp. strain 2.9
MHHHHHHGGSGVLPVFEPKGRVLLVDGHHLAYRNFFALKGLTTSLGEPVQGVYGFAKSLLKALKEDGDVVIVVFDAKAPSFRHEAYEAYKAGRAPTPEDFPRQLALMKELVDLLGLERLEVPGFEADDVLATLAKKAEREGYEVQILTADRDLFQLLSPRISVLHPEGHRITPEWLWEKYGLRPEQWVDFRALAGDPSDNIPGVKGIGEKTALKLLKEWGSLENLLKNLDQVKPESVREKILAHLEDLKLSRELSRVRTDLPLEVDFGRRREPDWEGLKAFLERLEFGSLLHEFGLLESPLLAEEAPWPPPEGAFLGYRLSRPEPMWAELLALAASAQGRVYRAEDPHGALRGLFEVRGLLAKDLAVVALREGLDLPPTDDPMLLAYLLDPSNTTPEGVARRYGGEWTEDAAKRALLAERLHENLLGRLQGEERLLWLYEEVEKPLSRVLAHMEATGVKLDVAYLENLELEVAAHMRRLEEEVFRLAGRSFRLNSRDQLERVLFDELGLPPIGKTEKTGKRSTSAAVLEALREVHPIVDKILQYREMAKLKGTYIDRLPALVHPKTGRLHTRFNQTATATGRLSSSDPNLQNIPVRTPLGQKIRRAFVAEEGWRLVALDYRQIELRVLAHLSGDENLIRVFQEGKDIHTQTASWMFGLSAEAIDPLMRRAAKTINFGVLYGMSAFRLSQELGIPYEEAQAFIQKYFQSYPKVKAWIEKTLREGRTRGYVETLFGRRRYVPDLNARVKGKREAAERMAFNMPVQGTAADLMKLAMVRLFPQLREVGARMLLQVHDELLLEAPKERAEEVAALAKEVMEGVWPLAVPLEVEVGIGEDWLAAKG

SEQ ID NO: 6425 - DNA, 2523 bp, synthetic construct
  misc_feature 1..2523: note = Variant of DNA polymerase I from Thermus sp. strain 2.9
  source 1..2523: mol_type = other DNA
atgcaccatcatcatcatcatggcggtagcggcgtgttaccggtgttcgagcctaaaggtcgcgtgcttctggttgatggccatcatctcgcgtatcgtaacttctttgccctgaaaggattaaccaccagcctgggcgagccggtacagggtgtctacggctttgcaaagtcgctcctgaaagctctgaaagaagacggtgatgtggtgattgttgtctttgatgcgaaagcgccaagttttcgccacgaagcgtacgaagcttacaaagccgggcgtgctccaacgccggaagactttcctcgccaattggcgcttatgaaggaattagtggatttgcttggcctcgaacgcttggaagttcccggtttcgaggcagacgacgtattagcgactctcgcaaagaaagccgaacgtgagggctatgaagtccagatcttgacagcagatcgcgatcttttccagcttttatctccgcgcatctcggtgttacacccggaagggcatcgtatcaccccggaatggctctgggagaaatatggtttgcgtcccgaacaatgggtggattttcgcgccttagcaggcgatccgagcgacaatattccgggagttaaaggtatcggcgagaagacggcgctcaagctccttaaagaatgggggtcgttggagaacttgcttaagaatttagatcaggtcaaaccagagtcagtgcgtgagaagattcttgctcacctcgaagacctcaaattaagccgcgaattgtcccgtgtacgcaccgatttgccgctcgaagttgatttcggtcgccgccgcgaacctgactgggagggtcttaaagcgtttttagagcgtcttgaatttggttcgctcttgcatgaattcggccttttagaaagcccgttactggccgaagaagcaccttggccaccgcccgagggcgcgtttttaggttaccgtttgagtcgcccggaaccgatgtgggccgaattactggctcttgcagcgtctgcccagggacgtgtgtatcgcgcggaagaccctcatggtgcgctccgcggcctcttcgaagtccgtggactccttgccaaagacttagctgttgttgcattgcgcgaaggtcttgatttacctccgactgatgatccaatgcttcttgcgtacctcttggacccgtcaaacacgacgcccgaaggcgtagcccgtcgttacggcggcgagtggaccgaagatgcagcgaaacgcgcgttattggccgaacgtttgcacgaaaatttattaggacgtttgcaaggcgaggaacgtctcctctggctttacgaagaagtggagaaaccattgagtcgcgtgctcgcgcatatggaagctaccggtgtcaaattagacgtggcgtatttggagaatctcagccttgaagttgctgcccacatgcgccgcttggaggaagaacagttccgtttagcaggccgttcctttcgccttaactctcgcgatcagttagaacgtgtgttgttcgatgaacttggtctccctcctatcggcaagacagagaagaccggtaaacgtagcacttcagcggcggttttagaagctcttcgcgaagtccatcccattgtggacaagatcttgcagtaccgcgaaatggcgaaattgaaaggcacctatattgaccgtcttccggcattagtccacccgaaaacgggacgcctccatacccgcttcaaccaaacagccacggcgaccggtcgtttgtcctcctctgatccaaaccttcagaatattccagtacgtaccccattgggccagaagatccgccgtgcgtttgtagctgaggagggttggcgtttagtggccctcgattatcgtcaaattgaattacgtgtccttgcccatctttctggcgatgagaacctcatccgcgtgtttcaggaaggcaaagacattcacactcaaacggcaagctggatgtttggattatcagctgaagcgatcgatcctttgatgcgtcgtgcagcgaagaccatcaatttcggtgttctctacggtatgagtgcctttcgtttgtcgcaggaattaggcattccctatgaagaagctcaggcgttcattcagaaatactttcaaagctatcccaaagttaaagcatggatcgagaagactctccgtgaaggccgcacacgtggttacgtagagaccttatttggacgtcgccgctatgttcccgatttaaacgctcgcgtgaaaggcaagcgtgaagccgccgaacgcatggcgttcaacatgcctgtacagggcacggcagctgacctcatgaaacttgcaatggtgcgcctttttccacaattgcgtgaagttggtgcccgcatgctcttgcaggtccacgatgaactcttgttagaagcgccaaaagagcgtgcggaagaggtggcagccctcgcgaaagaagttatggaaggcgtgtggcccttagcggtgcctcttgaagtcgaagttggtattggcgaggattggctggctgccaaagga

SEQ ID NO: 6426 - protein, 841 aa, synthetic construct
  REGION 1..841: note = Variant of DNA polymerase I from Thermus sp. strain 2.9
MHHHHHHGGSGVLPVFEPKGRVLLVDGHHLAYRNFFALKGLTTSLGEPVQGVYGFAKSLLKALKEDGDVVIVVFDAKAPSFRHEAYEAYKAGRAPTPEDFPRQLALMKELVDLLGLERLEVPGFEADDVLATLAKKAEREGYEVQILTADRDLFQLLSPRISVLHPEGHRITPEWLWEKYGLRPEQWVDFRALAGDPSDNIPGVKGIGEKTALKLLKEWGSLENLLKNLDQVKPESVREKILAHLEDLKLSRELSRVRTDLPLEVDFGRRREPDWEGLKAFLERLEFGSLLHEFGLLESPLLAEEAPWPPPEGAFLGYRLSRPEPMWAELLALAASAQGRVYRAEDPHGALRGLFEVRGLLAKDLAVVALREGLDLPPTDDPMLLAYLLDPSNTTPEGVARRYGGEWTEDAAKRALLAERLHENLLGRLQGEERLLWLYEEVEKPLSRVLAHMEATGVKLDVAYLENLSLEVAAHMRRLEEEQFRLAGRSFRLNSRDQLERVLFDELGLPPIGKTEKTGKRSTSAAVLEALREVHPIVDKILQYREMAKLKGTYIDRLPALVHPKTGRLHTRFNQTATATGRLSSSDPNLQNIPVRTPLGQKIRRAFVAEEGWRLVALDYRQIELRVLAHLSGDENLIRVFQEGKDIHTQTASWMFGLSAEAIDPLMRRAAKTINFGVLYGMSAFRLSQELGIPYEEAQAFIQKYFQSYPKVKAWIEKTLREGRTRGYVETLFGRRRYVPDLNARVKGKREAAERMAFNMPVQGTAADLMKLAMVRLFPQLREVGARMLLQVHDELLLEAPKERAEEVAALAKEVMEGVWPLAVPLEVEVGIGEDWLAAKG

SEQ ID NO: 6427 - DNA, 2523 bp, synthetic construct
  misc_feature 1..2523: note = Variant of DNA polymerase I from Thermus sp. strain 2.9
  source 1..2523: mol_type = other DNA
atgcaccatcatcatcatcatggcggtagcggcgtgttaccggtgttcgagcctaaaggtcgcgtgcttctggttgatggccatcatctcgcgtatcgtaacttctttgccctgaaaggattaaccaccagcctgggcgagccggtacagggtgtctacggctttgcaaagtcgctcctgaaagctctgaaagaagacggtgatgtggtgattgttgtctttgatgcgaaagcgccaagttttcgccacgaagcgtacgaagcttacaaagccgggcgtgctccaacgccggaagactttcctcgccaattggcgcttatgaaggaattagtggatttgcttggcctcgaacgcttggaagttcccggtttcgaggcagacgacgtattagcgactctcgcaaagaaagccgaacgtgagggctatgaagtccagatcttgacagcagatcgcgatcttttccagcttttatctccgcgcatctcggtgttacacccggaagggcatcgtatcaccccggaatggctctgggagaaatatggtttgcgtcccgaacaatgggtggattttcgcgccttagcaggcgatccgagcgacaatattccgggagttaaaggtatcggcgagaagacggcgctcaagctccttaaagaatgggggtcgttggagaacttgcttaagaatttagatcaggtcaaaccagagtcagtgcgtgagaagattcttgctcacctcgaagacctcaaattaagccgcgaattgtcccgtgtacgcaccgatttgccgctcgaagttgatttcggtcgccgccgcgaacctgactgggagggtcttaaagcgtttttagagcgtcttgaatttggttcgctcttgcatgaattcggccttttagaaagcccgttactggccgaagaagcaccttggccaccgcccgagggcgcgtttttaggttaccgtttgagtcgcccggaaccgatgtgggccgaattactggctcttgcagcgtctgcccagggacgtgtgtatcgcgcggaagaccctcatggtgcgctccgcggcatcttcgaagtccgtaccctccttgccaaagacttagctgttgttgcattgcgcgaaggtcttgatttacctccgactgatgatccaatgcttcttgcgtacctcttggacccgtcaaacacgacgcccgaaggcgtagcccgtcgttacggcggcgagtggtgggaagatgcagccaaacgcgcgttattggccgaacgtttgcacgaaaatttattaggacgtttgcaaggcgaggaacgtctcctctggctttacgaagaagtggagaaaccattgagtcgcgtgctcgcgcatatggaagctaccggtgtcaaattagacgtggcgtatttggagaatctcagccttgaagttgctgcccacatgcgccgcttggaggaagaagtattccgtttagcaggccgttcctttcgccttaactctcgcgatcagttagaacgtgtgttgttcgatgaacttggtctccctcctatcggcaagacagagaagaccggtaaacgtagcacttcagcggcggttttagaagctcttcgcgaagtccatcccattgtggacaagatcttgcagtaccgcgaaatggcgaaattgaaaggcacctatattgaccgtcttccggcattagtccacccgaaaacgggacgcctccatacccgcttcaaccaaacagccacggcgaccggtcgtttgtcctcctctgatccaaaccttcagaatattccagtacgtacctttttgggccagaagatccgccgtgcgtttgtagctgaggagggttggcgtttagtggccctcgattatcgtcaaattgaattacgtgtccttgcccatctttctggcgatgagaacctcatccgcgtgtttcaggaaggcaaagacattcacactcaaacggcaagctggatgtttggattatcagctgaagcgatcgatcctttgatgcgtcgtgcagcgaagaccatcaatttcggtgttctctacggtatgagtgcctttcgtttgtcgcaggaattaggcattccctatgaagaagctcaggcgttcattcagaaatactttcaaagctatcccaaagttaaagcatggatcgagaagactctccgtgaaggccgcacacgtggttacgtagagaccttatttggacgtcgccgctatgttcccgatttaaacgctcgcgtgaaaggcaagcgtgaagccgccgaacgcatggcgttcaacatgcctgtacagggcacggcagctgacctcatgaaacttgcaatggtgcgcctttttccacaattgcgtgaagttggtgcccgcatgctgttgcaggtccacgatgaactcttgttagaagcgccaaaagagcgtgcggaagaggtggcagccctcgcgaaagaagttatggaaggcgtgtggcccttagcggtgcctcttgaagtcgaagttggtattggcgaggattggctggctgccaaagga

SEQ ID NO: 6428 - protein, 841 aa, synthetic construct
  REGION 1..841: note = Variant of DNA polymerase I from Thermus sp. strain 2.9
MHHHHHHGGSGVLPVFEPKGRVLLVDGHHLAYRNFFALKGLTTSLGEPVQGVYGFAKSLLKALKEDGDVVIVVFDAKAPSFRHEAYEAYKAGRAPTPEDFPRQLALMKELVDLLGLERLEVPGFEADDVLATLAKKAEREGYEVQILTADRDLFQLLSPRISVLHPEGHRITPEWLWEKYGLRPEQWVDFRALAGDPSDNIPGVKGIGEKTALKLLKEWGSLENLLKNLDQVKPESVREKILAHLEDLKLSRELSRVRTDLPLEVDFGRRREPDWEGLKAFLERLEFGSLLHEFGLLESPLLAEEAPWPPPEGAFLGYRLSRPEPMWAELLALAASAQGRVYRAEDPHGALRGIFEVRTLLAKDLAVVALREGLDLPPTDDPMLLAYLLDPSNTTPEGVARRYGGEWWEDAAKRALLAERLHENLLGRLQGEERLLWLYEEVEKPLSRVLAHMEATGVKLDVAYLENLSLEVAAHMRRLEEEVFRLAGRSFRLNSRDQLERVLFDELGLPPIGKTEKTGKRSTSAAVLEALREVHPIVDKILQYREMAKLKGTYIDRLPALVHPKTGRLHTRFNQTATATGRLSSSDPNLQNIPVRTFLGQKIRRAFVAEEGWRLVALDYRQIELRVLAHLSGDENLIRVFQEGKDIHTQTASWMFGLSAEAIDPLMRRAAKTINFGVLYGMSAFRLSQELGIPYEEAQAFIQKYFQSYPKVKAWIEKTLREGRTRGYVETLFGRRRYVPDLNARVKGKREAAERMAFNMPVQGTAADLMKLAMVRLFPQLREVGARMLLQVHDELLLEAPKERAEEVAALAKEVMEGVWPLAVPLEVEVGIGEDWLAAKG

SEQ ID NO: 6429 - DNA, 2523 bp, synthetic construct
  misc_feature 1..2523: note = Variant of DNA polymerase I from Thermus sp. strain 2.9
  source 1..2523: mol_type = other DNA
atgcaccatcatcatcatcatggcggtagcggcgtgttaccggtgttcgagcctaaaggtcgcgtgcttctggttgatggccatcatctcgcgtatcgtaacttctttgccctgaaaggattaaccaccagcctgggcgagccggtacagggtgtctacggctttgcaaagtcgctcctgaaagctctgaaagaagacggtgatgtggtgattgttgtctttgatgcgaaagcgccaagttttcgccacgaagcgtacgaagcttacaaagccgggcgtgctccaacgccggaagactttcctcgccaattggcgcttatgaaggaattagtggatttgcttggcctcgaacgcttggaagttcccggtttcgaggcagacgacgtattagcgactctcgcaaagaaagccgaacgtgagggctatgaagtccagatcttgacagcagatcgcgatcttttccagcttttatctccgcgcatctcggtgttacacccggaagggcatcgtatcaccccggaatggctctgggagaaatatggtttgcgtcccgaacaatgggtggattttcgcgccttagcaggcgatccgagcgacaatattccgggagttaaaggtatcggcgagaagacggcgctcaagctccttaaagaatgggggtcgttggagaacttgcttaagaatttagatcaggtcaaaccagagtcagtgcgtgagaagattcttgctcacctcgaagacctcaaattaagccgcgaattgtcccgtgtacgcaccgatttgccgctcgaagttgatttcggtcgccgccgcgaacctgactgggagggtcttaaagcgtttttagagcgtcttgaatttggttcgctcttgcatgaattcggccttttagaaagcccgttactggccgaagaagcaccttggccaccgcccgagggcgcgtttttaggttaccgtttgagtcgcccggaaccgatgtgggccgaattactggctcttgcagcgtctgcccagggacgtgtgtatcgcgcggaagaccctcatggtgcgctccgcggcctcttcgaagtccgtggactccttgccaaagacttagctgttgttgcattgcgcgaaggtcttgatttacctccgactgatgatccaatgcttcttgcgtacctcttggacccgtcaaacacgacgcccgaaggcgtagcccgtcgttacggcggcgagtggaccgaagatgcagcgaaacgcgcgttattggccgaacgtttgcacgaaaatttattaggacgtttgcaaggcgaggaacgtctcctctggctttacgaagaagtggagaaaccattgagtcgcgtgctcgcgcatatggaagctaccggtgtcaaattagacgtggcgtatttggagaatctcagccttgaagttgctgcccacatgcgccgcttggaggaagaagtattccgtttagcaggccgttcctttcgccttaactctcgcgatcagttagaacgtgtgttgttcgatgaacttggtctccctcctatcggcaagacagagaagaccggtaaacgtagcacttcagcggcggttttagaagctcttcgcgaagtccatcccattgtggacaagatcttgcagtaccgcgaaatggcgaaattgaaaggcacctatattgaccgtcttccggcattagtccacccgaaaacgggacgcctccatacccgcttcaaccaaacagccacggcgaccggtcgtttgtcctcctctgatccaaaccttcagaatattccagtacgtaccccattgggccagaagatccgccgtgcgtttgtagctgaggagggttggcgtttagtggccctcgattatcgtcaaattgaattacgtgtccttgcccatctttctggcgatgagaacctcatccgcgtgtttcaggaaggcaaagacattcacactcaaacggcaagctggatgtttggattatcagctgaagcgatcgatcctttgatgcgtcgtgcagcgaagaccatcaatttcggtgttctctacggtatgagtgcctttcgtttgtcgcaggaattaggcattccctatgaagaagctcaggcgttcattcagaaatactttcaaagctatcccaaagttaaagcatggatcgagaagactctccgtgaaggccgcacacgtggttacgtagagaccttatttggacgtcgccgctatgttcccgatttaaacgctcgcgtgaaaggcaagcgtgaagccgccgaacgcatggcgttcaacatgcctgtacagggcacggcagctgacctcatgaaacttgcaatggtgcgcctttttccacaattgcgtgaagttggtgcccgcatgcctttgcaggtccacgatgaactcttgttagaagcgccaaaagagcgtgcggaagaggtggcagccctcgcgaaagaagttatggaaggcgtgtggcccttagcggtgcctcttgaagtcgaagttggtattggcgaggattggctggctgccaaagga

SEQ ID NO: 6430 - protein, 841 aa, synthetic construct
  REGION 1..841: note = Variant of DNA polymerase I from Thermus sp. strain 2.9
MHHHHHHGGSGVLPVFEPKGRVLLVDGHHLAYRNFFALKGLTTSLGEPVQGVYGFAKSLLKALKEDGDVVIVVFDAKAPSFRHEAYEAYKAGRAPTPEDFPRQLALMKELVDLLGLERLEVPGFEADDVLATLAKKAEREGYEVQILTADRDLFQLLSPRISVLHPEGHRITPEWLWEKYGLRPEQWVDFRALAGDPSDNIPGVKGIGEKTALKLLKEWGSLENLLKNLDQVKPESVREKILAHLEDLKLSRELSRVRTDLPLEVDFGRRREPDWEGLKAFLERLEFGSLLHEFGLLESPLLAEEAPWPPPEGAFLGYRLSRPEPMWAELLALAASAQGRVYRAEDPHGALRGLFEVRGLLAKDLAVVALREGLDLPPTDDPMLLAYLLDPSNTTPEGVARRYGGEWTEDAAKRALLAERLHENLLGRLQGEERLLWLYEEVEKPLSRVLAHMEATGVKLDVAYLENLSLEVAAHMRRLEEEVFRLAGRSFRLNSRDQLERVLFDELGLPPIGKTEKTGKRSTSAAVLEALREVHPIVDKILQYREMAKLKGTYIDRLPALVHPKTGRLHTRFNQTATATGRLSSSDPNLQNIPVRTPLGQKIRRAFVAEEGWRLVALDYRQIELRVLAHLSGDENLIRVFQEGKDIHTQTASWMFGLSAEAIDPLMRRAAKTINFGVLYGMSAFRLSQELGIPYEEAQAFIQKYFQSYPKVKAWIEKTLREGRTRGYVETLFGRRRYVPDLNARVKGKREAAERMAFNMPVQGTAADLMKLAMVRLFPQLREVGARMPLQVHDELLLEAPKERAEEVAALAKEVMEGVWPLAVPLEVEVGIGEDWLAAKG

SEQ ID NO: 6431 - DNA, 2523 bp, synthetic construct
  misc_feature 1..2523: note = Variant of DNA polymerase I from Thermus sp. strain 2.9
  source 1..2523: mol_type = other DNA
atgcaccatcatcatcatcatggcggtagcggcgtgttaccggtgttcgagcctaaaggtcgcgtgcttctggttgatggccatcatctcgcgtatcgtaacttctttgccctgaaaggattaaccaccagccgcggcgagccggtacagggtgtctacggctttgcaaagtcgctcctgaaagctctgaaagaagacggtgatgtggtgattgttgtctttgatgcgaaagcgccaagttttcgccacgaagcgtacgaagcttacaaagccgggcgtgctccaacgccggaagactttcctcgccaattggcgcttatgaaggaattagtggatttgcttggcctcgaacgcttggaagttcccggtttcgaggcagacgacgtattagcgactctcgcaaagaaagccgaacgtgagggctatgaagtccagatcttgacagcagatcgcgatcttttccagcttttatctccgcgcatctcggtgttacacccggaagggcatcgtatcaccccggaatggctctgggagaaatatggtttgcgtcccgaacaatgggtggattttcgcgccttagcaggcgatccgagcgacaatattccgggagttaaaggtatcggcgagaagacggcgctcaagctccttaaagaatgggggtcgttggagaacttgcttaagaatttagatcaggtcaaaccagagtcagtgcgtgagaagattcttgctcacctcgaagacctcaaattaagccgcgaattgtcccgtgtacgcaccgatttgccgctcgaagttgatttccgccgccgccgcgaacctgactgggagggtcttaaagcgtttttagagcgtcttgaatttggttcgctcttgcatgaattcggccttttagaaagcccgttaccggccgaagaagcaccttggccaccgcccgagggcgcgtttttaggttaccgtttgagtcgcccggaaccgatgtgggccgaattactggctcttgcagcgtctgcccagggacgtgtgtatcgcgcggaagaccctcatggtgcgctccgcggcctcttcgaagtccgtggactccttgccaaagacttagctgttgttgcattgcgcgaaggtcttgatttacctccgactgatgatccaatgcttcttgcgtacctcttggacccgtcaaacacgacgcccgaaggcgtagcccgtcgttacggcggcgagtggaccgaagatgcagcgaaacgcgcgttattggccgaacgtttgcacgaaaatttattaggacgtttgcaaggcgaggaacgtctcctctggctttacgaagaagtggagaaaccattgagtcgcgtgctcgcgcatatggaagctaccggtgtcaaattagacgtggcgtatttggagaatctcagccttgaagttgctgccgaaatgcgccgcttggaggaagaagtattccgtttagcaggccactcctttcgccttaactctcgcgatcagttagaacgtgtgttgttcgatgaacttggtctccctcctatcggcaagacagagaagaccggtaaacgtagcacttcagcggcggttttagaagctcttcgcgaagtccatcccattgtggacaagatcttgcagtaccgcgaaatggcgaaattgaaaggcacctatattgaccgtcttccggcattagtccacccgaaaacgggacgcctccatacccgcttcaaccaaacagccacggcgaccggtcgtttgtcctcctctgatccaaaccttcagaatattccagtacgtaccccattgggccagaagatccgccgtgcgtttgtagctgaggagggttggcgtttagtggccctcgattatcgtcaaattgaattacgtgtccttgcccatctttctggcgatgagaacctcatccgcgtgtttcaggaaggcaaagacattcacactcaaacggcaagctggatgtttggattatcagctgaagcgatcgatcctttgatgcgtcgtgcagcgaagaccatcaatttcggtgttctctacggtatgagtgcctttcgtttgtcgcaggaattaggcattccctatgaagaagctcaggcgttcattcagaaatactttcaaagctatcccaaagttaaagcatggatcgagaagactctccgtgaaggccgcacacgtggttacgtagagaccttatttggacgtcgccgctatgttcccgatttaaacgctcgcgtgaaaggcaagcgtgaagccgccgaacgcatggcgttcaacatgcctgtacagggcacggcagctgacctcatgaaacttgcaatggtgcgcctttttccacaattgcgtgaagttggtgcccgcatgctcttgcaggtccacgatgaactcttgttagaagcgccaaaagagcgtgcggaagaggtggcagccctcgcgaaagaagttatggaaggcgtgtggcccttagcggtgcctcttgaagtcgaagttggtattggcgaggattggctggctgccaaagga

SEQ ID NO: 6432 - protein, 841 aa, synthetic construct
  REGION 1..841: note = Variant of DNA polymerase I from Thermus sp. strain 2.9
MHHHHHHGGSGVLPVFEPKGRVLLVDGHHLAYRNFFALKGLTTSRGEPVQGVYGFAKSLLKALKEDGDVVIVVFDAKAPSFRHEAYEAYKAGRAPTPEDFPRQLALMKELVDLLGLERLEVPGFEADDVLATLAKKAEREGYEVQILTADRDLFQLLSPRISVLHPEGHRITPEWLWEKYGLRPEQWVDFRALAGDPSDNIPGVKGIGEKTALKLLKEWGSLENLLKNLDQVKPESVREKILAHLEDLKLSRELSRVRTDLPLEVDFRRRREPDWEGLKAFLERLEFGSLLHEFGLLESPLPAEEAPWPPPEGAFLGYRLSRPEPMWAELLALAASAQGRVYRAEDPHGALRGLFEVRGLLAKDLAVVALREGLDLPPTDDPMLLAYLLDPSNTTPEGVARRYGGEWTEDAAKRALLAERLHENLLGRLQGEERLLWLYEEVEKPLSRVLAHMEATGVKLDVAYLENLSLEVAAEMRRLEEEVFRLAGHSFRLNSRDQLERVLFDELGLPPIGKTEKTGKRSTSAAVLEALREVHPIVDKILQYREMAKLKGTYIDRLPALVHPKTGRLHTRFNQTATATGRLSSSDPNLQNIPVRTPLGQKIRRAFVAEEGWRLVALDYRQIELRVLAHLSGDENLIRVFQEGKDIHTQTASWMFGLSAEAIDPLMRRAAKTINFGVLYGMSAFRLSQELGIPYEEAQAFIQKYFQSYPKVKAWIEKTLREGRTRGYVETLFGRRRYVPDLNARVKGKREAAERMAFNMPVQGTAADLMKLAMVRLFPQLREVGARMLLQVHDELLLEAPKERAEEVAALAKEVMEGVWPLAVPLEVEVGIGEDWLAAKG

SEQ ID NO: 6433 - DNA, 2523 bp, synthetic construct
  misc_feature 1..2523: note = Variant of DNA polymerase I from Thermus sp. strain 2.9
  source 1..2523: mol_type = other DNA
atgcaccatcatcatcatcatggcggtagcggcgtgttaccggtgttcgagcctaaaggtcgcgtgcttctggttgatggccatcatctcgcgtatcgtaacttctttgccctgaaaggattaaccaccagcctgggcgagccggtacagggtgtctacggctttgcaaagtcgctcctgaaagctctgaaagaagacggtgatgtggtgattgttgtctttgatgcgaaagcgccaagttttcgccacgaagcgtacgaagcttacaaagccgggcgtgctccaacgccggaagactttcctcgccaattggcgcttatgaaggaattagtggatttgcttggcctcgaacgcttggaagttcccggtttcgaggcagacgacgtattagcgactctcgcaaagaaagccgaacgtgagggctatgaagtccagatcttgacagcagatcgcgatcttttccagcttttatctccgcgcatctcggtgttacacccggaagggcatcgtatcaccccggaatggctctgggagaaatatggtttgcgtcccgaacaatgggtggattttcgcgccttagcaggcgatccgagcgacaatattccgggagttaaaggtatcggcgagaagacggcgctcaagctccttaaagaatgggggtcgttggagaacttgcttaagaatttagatcaggtcaaaccagagtcagtgcgtgagaagattcttgctcacctcgaagacctcaaattaagccgcgaattgtcccgtgtacgcaccgatttgccgctcgaagttgatttcggtcgccgccgcgaacctgactgggagggtcttaaagcgtttttagagcgtcttgaatttggttcgctcttgcatgaattcggccttttagaaagcccgttactggccgaagaagcaccttggccaccgcccgagggcgcgtttttaggttaccgtttgagtcgcccggaaccgatgtgggccgaattactggctcttgcagcgtctgcccagggacgtgtgtatcgcgcggaagaccctcatggtgcgctccgcggcctcttcgaagtccgtggactccttgccaaagacttagctgttgttgcattgcgcgaaggtcttgatttacctccgactgatgatccaatgcttcttgcgtacctcttggacccgtcaaacacgacgcccgaaggcgtagcccgtcgttacggcggcgagtggaccgaagatgcagcgaaacgcgcgttattggccgaacgtttgcacgaaaatttattaggacgtttgcaaggcgaggaacgtctcctctggctttacgaagaagtggagaaaccattgagtcgcgtgctcgcgcatatggaagctaccggtgtcaaattagacgtggcgtatttggagaatctcagccttgaagttgctgcccacatgcgccgcttggaggaagaagtattccgtttagcaggccgttcctttcgccttaactctcgcgatcagttagaacgtgtgttgttcgatgaacttggtctccctcctatcggcaagacagagaagaccggtaaacgtagcacttcagcggcggttttagaagctcttcgcgaagtccatcccattgtggacaagatcttgcagtaccgcgaaatggcgaaattgaaaggcacctatattgaccgtcttccggcattagtccacccgaaaacgggacgcctccatacccgcttcaaccaaacagccacggcgaccggtcgtttgtcctcctctgatccaaaccttcagaatattccagtacgtaccccattgggccagaagatccgccgtgcgtttgtagctgaggagggttggcgtttagtggccctcgattatcgtcaaattgaattacgtgtccttgcccatctttctggcgatgagaacctcatccgcgtgtttcaggaaggcaaagacattcacactcaaacggcaagctggatgtttggattatcagctgaagcgatcgatcctttgatgcgtcgtgcagcgaagaccatcaatttcggtgttctctacggtatgagtgcctttcgtttgtcgcaggaagcgggcattccctatgaagaagctcaggcgttcattcagaaatactttcaaagctatcccaaagttaaagcatggatcgagaagactctccgtgaaggccgcacacgtggttacgtagagaccttatttggacgtcgccgctatgttcccgatttaaacgctcgcgtgaaaggcaagcgtgaagccgccgaacgcatggcgttcaacatgcctgtacagggcacggcagctgacctcatgaaacttgcaatggtgcgcctttttccacaattgcgtgaagttggtgcccgcatgctcttgcaggtccacgatgaactcttgttagaagcgccaaaagagcgtgcggaagaggtggcagccctcgcgaaagaagttatggaaggcgtgtggcccttagcggtgcctcttgaagtcgaagttggtattggcgaggattggctggctgccaaagga

SEQ ID NO: 6434 - protein, 841 aa, synthetic construct
  REGION 1..841: note = Variant of DNA polymerase I from Thermus sp. strain 2.9
MHHHHHHGGSGVLPVFEPKGRVLLVDGHHLAYRNFFALKGLTTSLGEPVQGVYGFAKSLLKALKEDGDVVIVVFDAKAPSFRHEAYEAYKAGRAPTPEDFPRQLALMKELVDLLGLERLEVPGFEADDVLATLAKKAEREGYEVQILTADRDLFQLLSPRISVLHPEGHRITPEWLWEKYGLRPEQWVDFRALAGDPSDNIPGVKGIGEKTALKLLKEWGSLENLLKNLDQVKPESVREKILAHLEDLKLSRELSRVRTDLPLEVDFGRRREPDWEGLKAFLERLEFGSLLHEFGLLESPLLAEEAPWPPPEGAFLGYRLSRPEPMWAELLALAASAQGRVYRAEDPHGALRGLFEVRGLLAKDLAVVALREGLDLPPTDDPMLLAYLLDPSNTTPEGVARRYGGEWTEDAAKRALLAERLHENLLGRLQGEERLLWLYEEVEKPLSRVLAHMEATGVKLDVAYLENLSLEVAAHMRRLEEEVFRLAGRSFRLNSRDQLERVLFDELGLPPIGKTEKTGKRSTSAAVLEALREVHPIVDKILQYREMAKLKGTYIDRLPALVHPKTGRLHTRFNQTATATGRLSSSDPNLQNIPVRTPLGQKIRRAFVAEEGWRLVALDYRQIELRVLAHLSGDENLIRVFQEGKDIHTQTASWMFGLSAEAIDPLMRRAAKTINFGVLYGMSAFRLSQEAGIPYEEAQAFIQKYFQSYPKVKAWIEKTLREGRTRGYVETLFGRRRYVPDLNARVKGKREAAERMAFNMPVQGTAADLMKLAMVRLFPQLREVGARMLLQVHDELLLEAPKERAEEVAALAKEVMEGVWPLAVPLEVEVGIGEDWLAAKG

SEQ ID NO: 6435 - DNA, 2523 bp, synthetic construct
  misc_feature 1..2523: note = Variant of DNA polymerase I from Thermus sp. strain 2.9
  source 1..2523: mol_type = other DNA
atgcaccatcatcatcatcatggcggtagcggcgtgttaccggtgttcgagcctaaaggtcgcgtgcttctggttgatggccatcatctcgcgtatcgtaacttctttgccctgaaaggattaaccaccagcctgggcgagccggtacagggtgtctacggctttgcaaagtcgctcctgaaagctctgaaagaagacggtgatgtggtgattgttgtctttgatgcgaaagcgccaagttttcgccacgaagcgtacgaagcttacaaagccgggcgtgctccaacgccggaagactttcctcgccaattggcgcttatgaaggaattagtggatttgcttggcctcgaacgcttggaagttcccggtttcgaggcagacgacgtattagcgactctcgcaaagaaagccgaacgtgagggctatgaagtccagatcttgacagcagatcgcgatcttttccagcttttatctccgcgcatctcggtgttacacccggaagggcatcgtatcaccccggaatggctctgggagaaatatggtttgcgtcccgaacaatgggtggattttcgcgccttagcaggcgatccgagcgacaatattccgggagttaaaggtatcggcgagaagacggcgctcaagctccttaaagaatgggggtcgttggagaacttgcttaagaatttagatcaggtcaaaccagagtcagtgcgtgagaagattcttgctcacctcgaagacctcaaattaagccgcgaattgtcccgtgtacgcaccgatttgccgctcgaagttgatttcggtcgccgccgcgaacctgactgggagggtcttaaagcgtttttagagcgtcttgaatttggttcgctcttgcatgaattcggccttttagaaagcccgttactggccgaagaagcaccttggccaccgcccgagggcgcgtttttaggttaccgtttgagtcgcccggaaccgatgtgggccgaattactggctcttgcagcgtctgcccagggacgtgtgtatcgcgcggaagaccctcatggtgcgctccgcggcctcttcgaagtccgtggactccttgccaaagacttagctgttgttgcattgcgcgaaggtcttgatttacctccgactgatgatccaatgcttcttgcgtacctcttggacccgtcaaacacgacgcccgaaggcgtagcccgtcgttactcgggcgagtggaccgaagatgcagcgaaacgcgcgttattggccgaacgtttgcacgaaaatttattaggacgtttgcaaggcgaggaacgtctcctctggctttacgaagaagtggagaaaccattgagtcgcgtgctcgcgcatatggaagctaccggtgtcaaattagacgtggcgtatttggagaatctcagccttgaagttgctgcccacatgcgccgcttggaggaagaagtattccgtttagcaggccgttcctttcgccttaactctcgcgatcagttagaacgtgtgttgttcgatgaacttggtctccctcctatcggcaagacagagaagaccggtaaacgtagcacttcagcggcggttttagaagctcttcgcgaagtccatcccattgtggacaagatcttgcagtaccgcgaaatggcgaaattgaaaggcacctatattgaccgtcttccggcattagtccacccgaaaacgggacgcctccatacccgcttcaaccaaacagccacggcgaccggtcgtttgtcctcctctgatccaaaccttcagaatattccagtacgtaccccattgggccagaagatccgccgtgcgtttgtagctgaggagggttggcgtttagtggccctcgattatcgtcaaattgaattacgtgtccttgcccatctttctggcgatgagaacctcatccgcgtgtttcaggaaggcaaagacattcacactcaaacggcaagctggatgtttggattatcagctgaagcgatcgatcctttgatgcgtcgtgcagcgaagaccatcaatttcggtgttctctacggtatgagtgcctttcgtttgtcgcaggaattaggcattccctatgaagaagctcaggcgttcattcagaaatactttcaaagctatcccaaagttaaagcatggatcgagaagactctccgtgaaggccgcacacgtggttacgtagagaccttatttggacgtcgccgctatgttcccgatttaaacgctcgcgtgaaaggcaagcgtgaagccgccgaacgcatggcgttcaacatgcctgtacagggcacggcagctgacctcatgaaacttgcaatggtgcgcctttttccacaattgcgtgaagttggtgcccgcatgctcttgcaggtccacgatgaactcttgttagaagcgccaaaagagcgtgcggaagaggtggcagccctcgcgaaagaagttatggaaggcgtgtggcccttagcggtgcctcttgaagtcgaagttggtattggcgaggattggctggctgccaaagga

SEQ ID NO: 6436 - protein, 841 aa, synthetic construct
  REGION 1..841: note = Variant of DNA polymerase I from Thermus sp. strain 2.9
MHHHHHHGGSGVLPVFEPKGRVLLVDGHHLAYRNFFALKGLTTSLGEPVQGVYGFAKSLLKALKEDGDVVIVVFDAKAPSFRHEAYEAYKAGRAPTPEDFPRQLALMKELVDLLGLERLEVPGFEADDVLATLAKKAEREGYEVQILTADRDLFQLLSPRISVLHPEGHRITPEWLWEKYGLRPEQWVDFRALAGDPSDNIPGVKGIGEKTALKLLKEWGSLENLLKNLDQVKPESVREKILAHLEDLKLSRELSRVRTDLPLEVDFGRRREPDWEGLKAFLERLEFGSLLHEFGLLESPLLAEEAPWPPPEGAFLGYRLSRPEPMWAELLALAASAQGRVYRAEDPHGALRGLFEVRGLLAKDLAVVALREGLDLPPTDDPMLLAYLLDPSNTTPEGVARRYSGEWTEDAAKRALLAERLHENLLGRLQGEERLLWLYEEVEKPLSRVLAHMEATGVKLDVAYLENLSLEVAAHMRRLEEEVFRLAGRSFRLNSRDQLERVLFDELGLPPIGKTEKTGKRSTSAAVLEALREVHPIVDKILQYREMAKLKGTYIDRLPALVHPKTGRLHTRFNQTATATGRLSSSDPNLQNIPVRTPLGQKIRRAFVAEEGWRLVALDYRQIELRVLAHLSGDENLIRVFQEGKDIHTQTASWMFGLSAEAIDPLMRRAAKTINFGVLYGMSAFRLSQELGIPYEEAQAFIQKYFQSYPKVKAWIEKTLREGRTRGYVETLFGRRRYVPDLNARVKGKREAAERMAFNMPVQGTAADLMKLAMVRLFPQLREVGARMLLQVHDELLLEAPKERAEEVAALAKEVMEGVWPLAVPLEVEVGIGEDWLAAKG

SEQ ID NO: 6437 - DNA, 2523 bp, synthetic construct
  misc_feature 1..2523: note = Variant of DNA polymerase I from Thermus sp. strain 2.9
  source 1..2523: mol_type = other DNA
atgcaccatcatcatcatcatggcggtagcggcgtgttaccggtgttcgagcctaaaggtcgcgtgcttctggttgatggccatcatctcgcgtatcgtaacttctttgccctgaaaggattaaccaccagcctgggcgagccggtacagggtgtctacggctttgcaaagtcgctcctgaaagctctgaaagaagacggtgatgtggtgattgttgtctttgatgcgaaagcgccaagttttcgccacgaagcgtacgaagcttacaaagccgggcgtgctccaacgccggaagactttcctcgccaattggcgcttatgaaggaattagtggatttgcttggcctcgaacgcttggaagttcccggtttcgaggcagacgacgtattagcgactctcgcaaagaaagccgaacgtgagggctatgaagtccagatcttgacagcagatcgcgatcttttccagcttttatctccgcgcatctcggtgttacacccggaagggcatcgtatcaccccggaatggctctgggagaaatatggtttgcgtcccgaacaatgggtggattttcgcgccttagcaggcgatccgagcgacaatattccgggagttaaaggtatcggcgagaagacggcgctcaagctccttaaagaatgggggtcgttggagaacttgcttaagaatttagatcaggtcaaaccagagtcagtgcgtgagaagattcttgctcacctcgaagacctcaaattaagccgcgaattgtcccgtgtacgcaccgatttgccgctcgaagttgatttcggtcgccgccgcgaacctgactgggagggtcttaaagcgtttttagagcgtcttgaatttggttcgctcttgcatgaattcggccttttagaaagcccgttactggccgaagaagcaccttggccaccgcccgagggcgcgtttttaggttaccgtttgagtcgcccggaaccgatgtgggccgaattactggctcttgcagcgtctgcccagggacgtgtgtatcgcgcggaagaccctcatggtgcgctccgcggcctcttcgaagtccgtggactccttgccaaagacttagctgttgttgcattgcgcgaaggtcttgatttacctccgactgatgatccaatgcttcttgcgtacctcttggacccgtcaaacacgacgcccgaaggcgtagcccgtcgttacggcggcgagtggaccgaagatgcagcgaaacgcgcgttattggccgaacgtttgcacgaaaatttattaggacgtttgcaaggcgaggaacgtctcctctggctttacgaagaagtggagaaaccattgagtcgcgtgctcgcgcatatggaagctaccggtgtcaaattagacgtggcgtatttggagaatctcagccttgaagttgctgcccacatgcgccgcttggaggaagaagtattccgtttagcaggccgttcctttcgccttaactctcgcgatcagttagaacgtgtgttgttcgatgaacttggtctccctcctatcggcaagacagagaagaccggtaaacgtagcacttcagcggcggttttagaagctcttcgcgaagtccatcccattgtggacaagatcttgcagtaccgcgaaatggcgaaattgaaaggcacctatattgaccgtcttccggcattagtccacccgaaaacgggacgcctccatacccgcttcaaccaaacagccacggcgaccggtcgtttgtcctcctctgatccaaaccttcagaatattccagtacgtaccccattgggccagaagatccgccgtgcgtttgtagctgaggagggttggcgtttagtggccctcgattatcgtcaaattgaattacgtgtccttgcccatctttctggcgatgagaacctcatccgcgtgtttcaggaaggcaaagacattcacactcaaacggcaagctggatgtttggattatcagctgaagcgatcgatcctttgatgcgtcgtgcagcgaagaccatcaatttcggtgttctctacggtatgagtgcctttcgtttgtcgcaggaattaggcattccctatgaagaagctcaggcgttcattcagaaatactttcaaagctatcccaaagttaaagcatggatcgagaagactctccgtgaaggccgcacacgtggttacgtagagaccttatttggacgtcgccgctatgttcccgatttaaacgctcgcgtgaaaggcaagcgtgaagccgccgaacgcatggcgttcaacatgcctgtacagggcacggcagctgacctcatgaaacttgcaatggtgcgcctttttccacaattgcgtgaagttggtgcccgcatgctcttgggggtccacgatgaactcttgttagaagcgccaaaagagcgtgcggaagaggtggcagccctcgcgaaagaagttatggaaggcgtgtggcccttagcggtgcctcttgaagtcgaagttggtattggcgaggattggctggctgccaaagga

SEQ ID NO: 6438 - protein, 841 aa, synthetic construct
  REGION 1..841: note = Variant of DNA polymerase I from Thermus sp. strain 2.9
MHHHHHHGGSGVLPVFEPKGRVLLVDGHHLAYRNFFALKGLTTSLGEPVQGVYGFAKSLLKALKEDGDVVIVVFDAKAPSFRHEAYEAYKAGRAPTPEDFPRQLALMKELVDLLGLERLEVPGFEADDVLATLAKKAEREGYEVQILTADRDLFQLLSPRISVLHPEGHRITPEWLWEKYGLRPEQWVDFRALAGDPSDNIPGVKGIGEKTALKLLKEWGSLENLLKNLDQVKPESVREKILAHLEDLKLSRELSRVRTDLPLEVDFGRRREPDWEGLKAFLERLEFGSLLHEFGLLESPLLAEEAPWPPPEGAFLGYRLSRPEPMWAELLALAASAQGRVYRAEDPHGALRGLFEVRGLLAKDLAVVALREGLDLPPTDDPMLLAYLLDPSNTTPEGVARRYGGEWTEDAAKRALLAERLHENLLGRLQGEERLLWLYEEVEKPLSRVLAHMEATGVKLDVAYLENLSLEVAAHMRRLEEEVFRLAGRSFRLNSRDQLERVLFDELGLPPIGKTEKTGKRSTSAAVLEALREVHPIVDKILQYREMAKLKGTYIDRLPALVHPKTGRLHTRFNQTATATGRLSSSDPNLQNIPVRTPLGQKIRRAFVAEEGWRLVALDYRQIELRVLAHLSGDENLIRVFQEGKDIHTQTASWMFGLSAEAIDPLMRRAAKTINFGVLYGMSAFRLSQELGIPYEEAQAFIQKYFQSYPKVKAWIEKTLREGRTRGYVETLFGRRRYVPDLNARVKGKREAAERMAFNMPVQGTAADLMKLAMVRLFPQLREVGARMLLGVHDELLLEAPKERAEEVAALAKEVMEGVWPLAVPLEVEVGIGEDWLAAKG

SEQ ID NO: 6439 - DNA, 2523 bp, synthetic construct
  misc_feature 1..2523: note = Variant of DNA polymerase I from Thermus sp. strain 2.9
  source 1..2523: mol_type = other DNA
atgcaccatcatcatcatcatggcggtagcggcgtgttaccggtgttcgagcctaaaggtcgcgtgcttctggttgatggccatcatctcgcgtatcgtaacttctttgccctgaaaggattaaccaccagcctgggcgagccggtacagggtgtctacggctttgcaaagtcgctcctgaaagctctgaaagaagacggtgatgtggtgattgttgtctttgatgcgaaagcgccaagttttcgccacgaagcgtacgaagcttacaaagccgggcgtgctccaacgccggaagactttcctcgccaattggcgcttatgaaggaattagtggatttgcttggcctcgaacgcttggaagttcccggtttcgaggcagacgacgtattagcgactctcgcaaagaaagccgaacgtgagggctatgaagtccagatcttgacagcagatcgcgatcttttccagcttttatctccgcgcatctcggtgttacacccggaagggcatcgtatcaccccggaatggctctgggagaaatatggtttgcgtcccgaacaatgggtggattttcgcgccttagcaggcgatccgagcgacaatattccgggagttaaaggtatcggcgagaagacggcgctcaagctccttaaagaatgggggtcgttggagaacttgcttaagaatttagatcaggtcaaaccagagtcagtgcgtgagaagattcttgctcacctcgaagacctcaaattaagccgcgaattgtcccgtgtacgcaccgatttgccgctcgaagttgatttcggtcgccgccgcgaacctgactgggagggtcttaaagcgtttttagagcgtcttgaatttggttcgctcttgcatgaattcggccttttagaaagcccgttactggccgaagaagcaccttggccaccgcccgagggcgcgtttttaggttaccgtttgagtcgcccggaaccgatgtgggccgaattactggctcttgcagcgtctgcccagggacgtgtgtatcgcgcggaagaccctcatggtgcgctccgcggcctcttcgaagtccgtggactccttgccaaagacttagctgttgttgcattgcgcgaaggtcttgatttacctccgactgatgatccaatgcttcttgcgtacctcttggacccgtcaaacacgacgcccgaaggcgtagcccgtcgttacggcggcgagtggaccgaagatgcagcgaaacgcgcgttattggccgaacgtttgcacgcaaatttattaggacgtttgcaaggcgaggaacgtctcctctggctttacgaagaagtggagaaaccattgagtcgcgtgctcgcgcatatggaagctaccggtgtcaaattagacgtggcgtatttggagaatcttagccttgaagttgctgcccacatgcgccgcttggaggaagaagtattccgtttagcaggccactcctttcgccttaactctcgcgatcagttagaacgtgtgttgttcgatgaacttggtctccctcctatcggcaagacagagaagaccggtaaacgtagcacttcagcggcggttttagaagctcttcgcgaagtccatcccattgtggacaagatcttgcagtaccgcgaaatggcgaaattgaaaggcacctatattgaccgtcttccggcattagtccacccgaaaacgggacgcctccatacccgcttcaaccaaacagccacggcgaccggtcgtttgtcctcctctgatccaaaccttcagaatattccagtacgtaccccattgggccagaagatccgccgtgcgtttgtagctgaggagggttggcgtttagtggccctcgattatcgtcaaattgaattacgtgtccttgcccatctttctggcgatgagaacctcatccgcgtgtttcaggaaggcaaagacattcacactcaaacggcaagctggatgtttggattatcagctgaagcgatcgatcctttgatgcgtcgtgcagcgaagaccatcaatttcggtgttctctacggtatgagtgcctttcgtttgtcgcaggaattaggcattccctatgaagaagctcaggcgttcattcagaaatactttcaaagctatcccaaagttaaagcatggatcgagaagactctccgtgaaggccgcacacgtggttacgtagagaccttatttggacgtcgccgctatgttcccgatttaaacgctcgcgtgaaaggcaagcgtgaagccgccgaacgcatggcgttcaacatgcctgtacagggcacggcagctgacctcatgaaacttgcaatggtgcgcctttttccacaattgcgtgaagttggtgcccgcatgctcttgcaggtccacgatgaactcttgttagaagcgccaaaagagcgtgcggaagaggtggcagccctcgcgaaagaagttatggaaggcgtgtggcccttagcggtgcctcttgaagtcgaagttggtattggcgaggattggctggctgccaaagga

SEQ ID NO: 6440 - protein, 841 aa, synthetic construct
  REGION 1..841: note = Variant of DNA polymerase I from Thermus sp. strain 2.9
MHHHHHHGGSGVLPVFEPKGRVLLVDGHHLAYRNFFALKGLTTSLGEPVQGVYGFAKSLLKALKEDGDVVIVVFDAKAPSFRHEAYEAYKAGRAPTPEDFPRQLALMKELVDLLGLERLEVPGFEADDVLATLAKKAEREGYEVQILTADRDLFQLLSPRISVLHPEGHRITPEWLWEKYGLRPEQWVDFRALAGDPSDNIPGVKGIGEKTALKLLKEWGSLENLLKNLDQVKPESVREKILAHLEDLKLSRELSRVRTDLPLEVDFGRRREPDWEGLKAFLERLEFGSLLHEFGLLESPLLAEEAPWPPPEGAFLGYRLSRPEPMWAELLALAASAQGRVYRAEDPHGALRGLFEVRGLLAKDLAVVALREGLDLPPTDDPMLLAYLLDPSNTTPEGVARRYGGEWTEDAAKRALLAERLHANLLGRLQGEERLLWLYEEVEKPLSRVLAHMEATGVKLDVAYLENLSLEVAAHMRRLEEEVFRLAGHSFRLNSRDQLERVLFDELGLPPIGKTEKTGKRSTSAAVLEALREVHPIVDKILQYREMAKLKGTYIDRLPALVHPKTGRLHTRFNQTATATGRLSSSDPNLQNIPVRTPLGQKIRRAFVAEEGWRLVALDYRQIELRVLAHLSGDENLIRVFQEGKDIHTQTASWMFGLSAEAIDPLMRRAAKTINFGVLYGMSAFRLSQELGIPYEEAQAFIQKYFQSYPKVKAWIEKTLREGRTRGYVETLFGRRRYVPDLNARVKGKREAAERMAFNMPVQGTAADLMKLAMVRLFPQLREVGARMLLQVHDELLLEAPKERAEEVAALAKEVMEGVWPLAVPLEVEVGIGEDWLAAKG

SEQ ID NO: 6441 - DNA, 2523 bp, synthetic construct
  misc_feature 1..2523: note = Variant of DNA polymerase I from Thermus sp. strain 2.9
  source 1..2523: mol_type = other DNA
atgcaccatcatcatcatcatggcggtagcggcgtgttaccggtgttcgagcctaaaggtcgcgtgcttctggttgatggccatcatctcgcgtatcgtaacttctttgccctgaaaggattaaccaccagcctgggcgagccggtacagggtgtctacggctttgcaaagtcgctcctgaaagctctgaaagaagacggtgatgtggtgattgttgtctttgatgcgaaagcgccaagttttcgccacgaagcgtacgaagcttacaaagccgggcgtgctccaacgccggaagactttcctcgccaattggcgcttatgaaggaattagtggatttgcttggcctcgaacgcttggaagttcccggtttcgaggcagacgacgtattagcgactctcgcaaagaaagccgaacgtgagggctatgaagtccagatcttgacagcagatcgcgatcttttccagcttttatctccgcgcatctcggtgttacacccggaagggcatcgtatcaccccggaatggctctgggagaaatatggtttgcgtcccgaacaatgggtggattttcgcgccttagcaggcgatccgagcgacaatattccgggagttaaaggtatcggcgagaagacggcgctcaagctccttaaagaatgggggtcgttggagaacttgcttaagaatttagatcaggtcaaaccagagtcagtgcgtgagaagattcttgctcacctcgaagacctcaaattaagccgcgaattgtcccgtgtacgcaccgatttgccgctcgaagttgatttcggtcgccgccgcgaacctgactgggagggtcttaaagcgtttttagagcgtcttgaatttggttcgctcttgcatgaattcggccttttagaaagcccgttactggccgaagaagcaccttggccaccgcccgagggcgcgtttttaggttaccgtttgagtcgcccggaaccgatgtgggccgaattactggctcttgcagcgtctgcccagggacgtgtgtatcgcgcggaagaccctcatggtgcgctccgcggcctcttcgaagtccgtggactccttgccaaagacttagctgttgttgcattgcgcgaaggtcttgatttacctccgactgatgatccaatgcttcttgcgtacctcttggacccgtcaaacacgacgcccgaaggcgtagcccgtcgttacggcggcgagtggaccgaagatgcagcgaaacgcgcgttattggccgaacgtttgcacgaaaatttattaggacgtttgcaaggcgaggaacgtctcctctggctttacgaagaagtggagaaaccattgagtcgcgtgctcgcgcatatggaagctaccggtgtcaaattagacgtggcgtatttggaggcccttagccttgaagttgctgcccacatgcgccgcttggaggaagaagtattccgtttagcaggccgttcctttcgccttaactctcgcgatcagttagaacgtgtgttgttcgatgaacttggtctccctcctatcggcaagacagagaagaccggtaaacgtagcacttcagcggcggttttagaagctcttcgcgaagtccatcccattgtggacaagatcttgcagtaccgcgaaatggcgaaattgaaaggcacctatattgaccgtcttccggcattagtccacccgaaaacgggacgcctccatacccgcttcaaccaaacagccacggcgaccggtcgtttgtcctcctctgatccaaaccttcagaatattccagtacgtaccccattgggccagaagatccgccgtgcgtttgtagctgaggagggttggcgtttagtggccctcgattatcgtcaaattgaattacgtgtccttgcccatctttctggcgatgagaacctcatccgcgtgtttcaggaaggcaaagacattcacactcaaacggcaagctggatgtttggattatcagctgaagcgatcgatcctttgatgcgtcgtgcagcgaagaccatcaatttcggtgttctctacggtatgagtgcctttcgtttgtcgcaggaattaggcattccctatgaagaagctcaggcgttcattcagaaatactttcaaagctatcccaaagttaaagcatggatcgagaagactctcgaggaaggccgcacacgtggttacgtagagaccttatttggacgtcgccgctatgttcccgatttaaacgctcgcgtgaaaagcaaacgtgaagccgccgaacgcatggcgttcaacatgcctgtacagggcacggcagctgacctcatgaaacttgcaatggtgcgcctttttccacaattgcgtgaagttggtgcccgcatgctcttgcaggtccacgatgaactcttgttagaagcgccaaaagagcgtgcggaagaggtggcagccctcgcgaaagaagttatggaaggcgtgtggcccttagcggtgcctcttgaagtcgaagttggtattggcgaggattggctggctgccaaagga

SEQ ID NO: 6442 - protein, 841 aa, synthetic construct
  REGION 1..841: note = Variant of DNA polymerase I from Thermus sp. strain 2.9
MHHHHHHGGSGVLPVFEPKGRVLLVDGHHLAYRNFFALKGLTTSLGEPVQGVYGFAKSLLKALKEDGDVVIVVFDAKAPSFRHEAYEAYKAGRAPTPEDFPRQLALMKELVDLLGLERLEVPGFEADDVLATLAKKAEREGYEVQILTADRDLFQLLSPRISVLHPEGHRITPEWLWEKYGLRPEQWVDFRALAGDPSDNIPGVKGIGEKTALKLLKEWGSLENLLKNLDQVKPESVREKILAHLEDLKLSRELSRVRTDLPLEVDFGRRREPDWEGLKAFLERLEFGSLLHEFGLLESPLLAEEAPWPPPEGAFLGYRLSRPEPMWAELLALAASAQGRVYRAEDPHGALRGLFEVRGLLAKDLAVVALREGLDLPPTDDPMLLAYLLDPSNTTPEGVARRYGGEWTEDAAKRALLAERLHENLLGRLQGEERLLWLYEEVEKPLSRVLAHMEATGVKLDVAYLEALSLEVAAHMRRLEEEVFRLAGRSFRLNSRDQLERVLFDELGLPPIGKTEKTGKRSTSAAVLEALREVHPIVDKILQYREMAKLKGTYIDRLPALVHPKTGRLHTRFNQTATATGRLSSSDPNLQNIPVRTPLGQKIRRAFVAEEGWRLVALDYRQIELRVLAHLSGDENLIRVFQEGKDIHTQTASWMFGLSAEAIDPLMRRAAKTINFGVLYGMSAFRLSQELGIPYEEAQAFIQKYFQSYPKVKAWIEKTLEEGRTRGYVETLFGRRRYVPDLNARVKSKREAAERMAFNMPVQGTAADLMKLAMVRLFPQLREVGARMLLQVHDELLLEAPKERAEEVAALAKEVMEGVWPLAVPLEVEVGIGEDWLAAKG

SEQ ID NO: 6443 - DNA, 2523 bp, synthetic construct
  misc_feature 1..2523: note = Variant of DNA polymerase I from Thermus sp. strain 2.9
  source 1..2523: mol_type = other DNA
atgcaccatcatcatcatcatggcggtagcggcgtgttaccggtgttcgagcctaaaggtcgcgtgcttctggttgatggccatcatctcgcgtatcgtaacttctttgccctgaaaggattaaccaccagcctgggcgagccggtacagggtgtctacggctttgcaaagtcgctcctgaaagctctgaaagaagacggtgatgtggtgattgttgtctttgatgcgaaagcgccaagttttcgccacgaagcgtacgaagcttacaaagccgggcgtgctccaacgccggaagactttcctcgccaattggcgcttatgaaggaattagtggatttgcttggcctcgaacgcttggaagttcccggtttcgaggcagacgacgtattagcgactctcgcaaagaaagccgaacgtgagggctatgaagtccagatcttgacagcagatcgcgatcttttccagcttttatctccgcgcatctcggtgttacacccggaagggcatcgtatcaccccggaatggctctgggagaaatatggtttgcgtcccgaacaatgggtggattttcgcgccttagcaggcgatccgagcgacaatattccgggagttaaaggtatcggcgagaagacggcgctcaagctccttaaagaatgggggtcgttggagaacttgcttaagaatttagatcaggtcaaaccagagtcagtgcgtgagaagattcttgctcacctcgaagacctcaaattaagccgcgaattgtcccgtgtacgcaccgatttgccgctcgaagttgatttcggtcgccgccgcgaacctgactgggagggtcttaaagcgtttttagagcgtcttgaatttggttcgctcttgcatgaattcggccttttagaaagcccgttactggccgaagaagcaccttggccaccgcccgagggcgcgtttttaggttaccgtttgagtcgcccggaaccgatgtgggccgaattactggctcttgcagcgtctgcccagggacgtgtgtatcgcgcggaagaccctcatggtgcgctccgcggcctcttcgaagtccgtggactccttgccaaagacttagctgttgttgcattgcgcgaaggtcttgatttacctccgactgatgatccaatgcttcttgcgtacctcttggacccgtcaaacacgacgcccgaaggcgtagcccgtcgttacggcggcgagtggaccgaagatgcaaagaaacgcgcgttattggccgaacgtttgcacgaaaatttattaggacgtttgcaaggcgaggaacgtctcctctggctttacgaagaagtggagaaaccattgagtcgcgtgctcgcgcatatggaagctaccggtgtcaaattagacgtggcgtatttggagaatctcagccttgaagttgctgcccacatgcgccgcttggaggaagaagtattccgtttagcaggccgttcctttcgccttaactctcgcgatcagttagaacgtgtgttgttcgatgaacttggtctccctcctatcggcaagacagagaagaccggtaaacgtagcacttcagcggcggttttagaagctcttcgcgaagtccatcccattgtggacaagatcttgcagtaccgcgaaatggcgaaattgaaaggcacctatattgaccgtcttccggcattagtccacccgaaaacgggacgcctccatacccgcttcaaccaaacagccacggcgaccggtcgtttgtcctcctctgatccaaaccttcagaatattccagtacgtaccccattgggccagaagatccgccgtgcgtttgtagctgaggagggttggcgtttagtggccctcgattatcgtcaaattgaattacgtgtccttgcccatctttctggcgatgagaacctcatccgcgtgtttcaggaaggcaaagacattcacactcaaacggcaagctggatgtttggattatcagctgaagcgatcgatcctttgatgcgtcgtgcagcgaagaccatcaatttcggtgttctctacggtatgagtgcctttcgtttgtcgcaggaattaggcattccctatgaagaagctcaggcgttcattcagaaatactttcaaagctatcccaaagttaaagcatggatcgagaagactctccgtgaaggccgcacacgtggttacgtagagaccttatttggacgtcgccgctatgttcccgatttaaacgctcgcgtgaaaggcaagcgtgaagccgccgaacgcatggcgttcaacatgcctgtacagggcacggcagctgacctcatgaaacttgcaatggtgcgcctttttccacaattgcgtgaagttggtgcccgcatgctcttgcaggtccacgatgaactcttgttagaagcgccaaaagagcgtgcggaagaggtggcagccctcgcgaaagaagttatggaaggcgtgtggcccttagcggtgcctcttgaagtcgaagttggtattggcgaggattggctggctgccaaagga

SEQ ID NO: 6444 - protein, 841 aa, synthetic construct
  REGION 1..841: note = Variant of DNA polymerase I from Thermus sp. strain 2.9
MHHHHHHGGSGVLPVFEPKGRVLLVDGHHLAYRNFFALKGLTTSLGEPVQGVYGFAKSLLKALKEDGDVVIVVFDAKAPSFRHEAYEAYKAGRAPTPEDFPRQLALMKELVDLLGLERLEVPGFEADDVLATLAKKAEREGYEVQILTADRDLFQLLSPRISVLHPEGHRITPEWLWEKYGLRPEQWVDFRALAGDPSDNIPGVKGIGEKTALKLLKEWGSLENLLKNLDQVKPESVREKILAHLEDLKLSRELSRVRTDLPLEVDFGRRREPDWEGLKAFLERLEFGSLLHEFGLLESPLLAEEAPWPPPEGAFLGYRLSRPEPMWAELLALAASAQGRVYRAEDPHGALRGLFEVRGLLAKDLAVVALREGLDLPPTDDPMLLAYLLDPSNTTPEGVARRYGGEWTEDAKKRALLAERLHENLLGRLQGEERLLWLYEEVEKPLSRVLAHMEATGVKLDVAYLENLSLEVAAHMRRLEEEVFRLAGRSFRLNSRDQLERVLFDELGLPPIGKTEKTGKRSTSAAVLEALREVHPIVDKILQYREMAKLKGTYIDRLPALVHPKTGRLHTRFNQTATATGRLSSSDPNLQNIPVRTPLGQKIRRAFVAEEGWRLVALDYRQIELRVLAHLSGDENLIRVFQEGKDIHTQTASWMFGLSAEAIDPLMRRAAKTINFGVLYGMSAFRLSQELGIPYEEAQAFIQKYFQSYPKVKAWIEKTLREGRTRGYVETLFGRRRYVPDLNARVKGKREAAERMAFNMPVQGTAADLMKLAMVRLFPQLREVGARMLLQVHDELLLEAPKERAEEVAALAKEVMEGVWPLAVPLEVEVGIGEDWLAAKG

SEQ ID NO: 6445 - DNA, 2523 bp, synthetic construct
  misc_feature 1..2523: note = Variant of DNA polymerase I from Thermus sp. strain 2.9
  source 1..2523: mol_type = other DNA
atgcaccatcatcatcatcatggcggtagcggcgtgttaccggtgttcgagcctaaaggtcgcgtgcttctggttgatggccatcatctcgcgtatcgtaacttctttgccctgaaaggattaaccaccagcctgggcgagccggtacagggtgtctacggctttgcaaagtcgctcctgaaagctctgaaagaagacggtgatgtggtgattgttgtctttgatgcgaaagcgccaagttttcgccacgaagcgtacgaagcttacaaagccgggcgtgctccaacgccggaagactttcctcgccaattggcgcttatgaaggaattagtggatttgcttggcctcgaacgcttggaagttcccggtttcgaggcagacgacgtattagcgactctcgcaaagaaagccgaacgtgagggctatgaagtccagatcttgacagcagatcgcgatcttttccagcttttatctccgcgcatctcggtgttacacccggaagggcatcgtatcaccccggaatggctctgggagaaatatggtttgcgtcccgaacaatgggtggattttcgcgccttagcaggcgatccgagcgacaatattccgggagttaaaggtatcggcgagaagacggcgctcaagctccttaaagaatgggggtcgttggagaacttgcttaagaatttagatcaggtcaaaccagagtcagtgcgtgagaagattcttgctcacctcgaagacctcaaattaagccgcgaattgtcccgtgtacgcaccgatttgccgctcgaagttgatttcggtcgccgccgcgaacctgactgggagggtcttaaagcgtttttagagcgtcttgaatttggttcgctcttgcatgaattcggccttttagaaagcccgttactggccgaagaagcaccttggccaccgcccgagggcgcgtttttaggttaccgtttgagtcgcccggaaccgatgtgggccgaattactggctcttgcagcgtctgcccagggacgtgtgtatcgcgcggaagaccctcatggtgcgctccgcggcctcttcgaagtccgtggactccttgccaaagacttagctgttgttgcattgcgcgaaggtcttgatttacctccgactgatgatccaatgcttcttgcgtacctcttggacccgtcaaacacgacgcccgaaggcgtagcccgtcgttacggcggcgagtggaccgaagatgcagcgaaacgcgcgttattggccgaacgtttgcacgaaaatttattaggacgtttgcaaggcgaggaacgtctcctctggcttgaggaagaagtggagaaaccattgagtcgcgtgctcgcgcatatggaagctaccggtgtcaaattagacgtggcgtatttggagaatctcagccttgaagttgctgcccacatgcgccgcttggaggaagaagtattccgtttagcaggccgttcctttcgccttaactctcgcgatcagttagaacgtgtgttgttcgatgaacttggtctccctcctatcggcaagacagagaagaccggtaaacgtagcacttcagcggcggttttagaagctcttcgcgaagtccatcccattgtggacaagatcttgcagtaccgcgaaatggcgaaattgaaaggcacctatattgaccgtcttccggcattagtccacccgaaaacgggacgcctccatacccgcttcaaccaaacagccacggcgaccggtcgtttgtcctcctctgatccaaaccttcagaatattccagtacgtaccccattgggccagaagatccgccgtgcgtttgtagctgaggagggttggcgtttagtggccctcgattatcgtcaaattgaattacgtgtccttgcccatctttctggcgatgagaacctcatccgcgtgtttcaggaaggcaaagacattcacactcaaacggcaagctggatgtttggattatcagctgaagcgatcgatcctttgatgcgtcgtgcagcgaagaccatcaatttcggtgttctctacggtatgagtgcctttcgtttgtcgcaggaattaggcattccctatgaagaagctcaggcgttcattcagaaatactttcaaagctatcccaaagttaaagcatggatcgagaagactctccgtgaaggccgcacacgtggttacgtagagaccttatttggacgtcgccgctatgttcccgatttaaacgctcgcgtgaaaggcaagcgtgaagccgccgaacgcatggcgttcaacatgcctgtacagggcacggcagctgacctcatgaaacttgcaatggtgcgcctttttccacaattgcgtgaagttggtgcccgcatgctcttgcaggtccacgatgaactcttgttagaagcgccaaaagagcgtgcggaagaggtggcagccctcgcgaaagaagttatggaaggcgtgtggcccttagcggtgcctcttgaagtcgaagttggtattggcgaggattggctggctgccaaagga

SEQ ID NO: 6446 - protein, 841 aa, synthetic construct
  REGION 1..841: note = Variant of DNA polymerase I from Thermus sp. strain 2.9
MHHHHHHGGSGVLPVFEPKGRVLLVDGHHLAYRNFFALKGLTTSLGEPVQGVYGFAKSLLKALKEDGDVVIVVFDAKAPSFRHEAYEAYKAGRAPTPEDFPRQLALMKELVDLLGLERLEVPGFEADDVLATLAKKAEREGYEVQILTADRDLFQLLSPRISVLHPEGHRITPEWLWEKYGLRPEQWVDFRALAGDPSDNIPGVKGIGEKTALKLLKEWGSLENLLKNLDQVKPESVREKILAHLEDLKLSRELSRVRTDLPLEVDFGRRREPDWEGLKAFLERLEFGSLLHEFGLLESPLLAEEAPWPPPEGAFLGYRLSRPEPMWAELLALAASAQGRVYRAEDPHGALRGLFEVRGLLAKDLAVVALREGLDLPPTDDPMLLAYLLDPSNTTPEGVARRYGGEWTEDAAKRALLAERLHENLLGRLQGEERLLWLEEEVEKPLSRVLAHMEATGVKLDVAYLENLSLEVAAHMRRLEEEVFRLAGRSFRLNSRDQLERVLFDELGLPPIGKTEKTGKRSTSAAVLEALREVHPIVDKILQYREMAKLKGTYIDRLPALVHPKTGRLHTRFNQTATATGRLSSSDPNLQNIPVRTPLGQKIRRAFVAEEGWRLVALDYRQIELRVLAHLSGDENLIRVFQEGKDIHTQTASWMFGLSAEAIDPLMRRAAKTINFGVLYGMSAFRLSQELGIPYEEAQAFIQKYFQSYPKVKAWIEKTLREGRTRGYVETLFGRRRYVPDLNARVKGKREAAERMAFNMPVQGTAADLMKLAMVRLFPQLREVGARMLLQVHDELLLEAPKERAEEVAALAKEVMEGVWPLAVPLEVEVGIGEDWLAAKG

SEQ ID NO: 6447 - DNA, 2523 bp, synthetic construct
  misc_feature 1..2523: note = Variant of DNA polymerase I from Thermus sp. strain 2.9
  source 1..2523: mol_type = other DNA
atgcaccatcatcatcatcatggcggtagcggcgtgttaccggtgttcgagcctaaaggtcgcgtgcttctggttgatggccatcatctcgcgtatcgtaacttctttgccctgaaaggattaaccaccagcctgggcgagccggtacagggtgtctacggctttgcaaagtcgctcctgaaagctctgaaagaagacggtgatgtggtgattgttgtctttgatgcgaaagcgccaagttttcgccacgaagcgtacgaagcttacaaagccgggcgtgctccaacgccggaagactttcctcgccaattggcgcttatgaaggaattagtggatttgcttggcctcgaacgcttggaagttcccggtttcgaggcagacgacgtattagcgactctcgcaaagaaagccgaacgtgagggctatgaagtccagatcttgacagcagatcgcgatcttttccagcttttatctccgcgcatctcggtgttacacccggaagggcatcgtatcaccccggaatggctctgggagaaatatggtttgcgtcccgaacaatgggtggattttcgcgccttagcaggcgatccgagcgacaatattccgggagttaaaggtatcggcgagaagacggcgctcaagctccttaaagaatgggggtcgttggagaacttgcttaagaatttagatcaggtcaaaccagagtcagtgcgtgagaagattcttgctcacctcgaagacctcaaattaagccgcgaattgtcccgtgtacgcaccgatttgccgctcgaagttgatttcggtcgccgccgcgaacctgactgggagggtcttaaagcgtttttagagcgtcttgaatttggttcgctcttgcatgaattcggccttttagaaagcccgttactggccgaagaagcaccttggccaccgcccgagggcgcgtttttaggttaccgtttgagtcgcccggaaccgatgtgggccgaattactggctcttgcagcgtctgcccagggacgtgtgtatcgcgcggaagaccctcatggtgcgctccgcggcctcttcgaagtccgtggactccttgccaaagacttagctgttgttgcattgcgcgaaggtcttgatttacctccgactgatgatccaatgcttcttgcgtacctcttggacccgtcaaacacgacgcccgaaggcgtagcccgtcgttacggcggcgagtggaccgaagatgcagcgaaacgcgcgttattggccgaacgtttgcacgaaaatttattaggacgtttgcaaggcgaggaacgtctcctctggctttacgaagaagtggagaaaccattgagtcgcgtgctcgcgcatatggaagctaccggtgtcaaattagacgtggcgtatttggagaatctcagccttgaagttgctgcccacatgcgccgcttggaggaagaagtattccgtttagcaggccgttcctttcgccttaactctcgcgatcagttagaacgtgtgttgttcgatgaacttggtctccctcctatcggcaagacagagaagaccggtaaacgtagcacttcagcggcggttttagaagctcttcgcgaagtccatcccattgtggacaagatcttgcagtaccgcgaaatggcgaaattgaaaggcacctatattgaccgtcttccggcattagtccacccgaaaacgggacgcctccatacccgcttcaaccaaacagccacggcgaccggtcgtttgtcctcctctgggccaaaccttcagaatattccagtacgtaccccattgggccagaagatccgccgtgcgtttgtagctgaggagggttggcgtttagtggccctcgattatcgtcaaattgaattacgtgtccttgcccatctttctggcgatgagaacctcatccgcgtgtttcaggaaggcaaagacattcacactcaaacggcaagctggatgtttggattatcagctgaagcgatcgatcctttgatgcgtcgtgcagcgaagaccatcaatttcggtgttctctacggtatgagtgcctttcgtttgtcgcaggaattaggcattccctatgaagaagctcaggcgttcattcagaaatactttcaaagctatcccaaagttaaagcatggatcgagaagactctccgtgaaggccgcacacgtggttacgtagagaccttatttggacgtcgccgctatgttcccgatttaaacgctcgcgtgaaaggcaagcgtgaagccgccgaacgcatggcgttcaacatgcctgtacagggcacggcagctgacctcatgaaacttgcaatggtgcgcctttttccacaattgcgtgaagttggtgcccgcatgctcttgcaggtccacgatgaactcttgttagaagcgccaaaagagcgtgcggaagaggtggcagccctcgcgaaagaagttatggaaggcgtgtggcccttagcggtgcctcttgaagtcgaagttggtattggcgaggattggctggctgccaaagga

SEQ ID NO: 6448 - protein, 841 aa, synthetic construct
  REGION 1..841: note = Variant of DNA polymerase I from Thermus sp. strain 2.9
MHHHHHHGGSGVLPVFEPKGRVLLVDGHHLAYRNFFALKGLTTSLGEPVQGVYGFAKSLLKALKEDGDVVIVVFDAKAPSFRHEAYEAYKAGRAPTPEDFPRQLALMKELVDLLGLERLEVPGFEADDVLATLAKKAEREGYEVQILTADRDLFQLLSPRISVLHPEGHRITPEWLWEKYGLRPEQWVDFRALAGDPSDNIPGVKGIGEKTALKLLKEWGSLENLLKNLDQVKPESVREKILAHLEDLKLSRELSRVRTDLPLEVDFGRRREPDWEGLKAFLERLEFGSLLHEFGLLESPLLAEEAPWPPPEGAFLGYRLSRPEPMWAELLALAASAQGRVYRAEDPHGALRGLFEVRGLLAKDLAVVALREGLDLPPTDDPMLLAYLLDPSNTTPEGVARRYGGEWTEDAAKRALLAERLHENLLGRLQGEERLLWLYEEVEKPLSRVLAHMEATGVKLDVAYLENLSLEVAAHMRRLEEEVFRLAGRSFRLNSRDQLERVLFDELGLPPIGKTEKTGKRSTSAAVLEALREVHPIVDKILQYREMAKLKGTYIDRLPALVHPKTGRLHTRFNQTATATGRLSSSGPNLQNIPVRTPLGQKIRRAFVAEEGWRLVALDYRQIELRVLAHLSGDENLIRVFQEGKDIHTQTASWMFGLSAEAIDPLMRRAAKTINFGVLYGMSAFRLSQELGIPYEEAQAFIQKYFQSYPKVKAWIEKTLREGRTRGYVETLFGRRRYVPDLNARVKGKREAAERMAFNMPVQGTAADLMKLAMVRLFPQLREVGARMLLQVHDELLLEAPKERAEEVAALAKEVMEGVWPLAVPLEVEVGIGEDWLAAKG

SEQ ID NO: 6449 - DNA, 2523 bp, synthetic construct
  misc_feature 1..2523: note = Variant of DNA polymerase I from Thermus sp. strain 2.9
  source 1..2523: mol_type = other DNA
atgcaccatcatcatcatcatggcggtagcggcgtgttaccggtgttcgagcctaaaggtcgcgtgcttctggttgatggccatcatctcgcgtatcgtaacttctttgccctgaaaggattaaccaccagcctgggcgagccggtacagggtgtctacggctttgcaaagtcgctcctgaaagctctgaaagaagacggtgatgtggtgattgttgtctttgatgcgaaagcgccaagttttcgccacgaagcgtacgaagcttacaaagccgggcgtgctccaacgccggaagactttcctcgccaattggcgcttatgaaggaattagtggatttgcttggcctcgaacgcttggaagttcccggtttcgaggcagacgacgtattagcgactctcgcaaagaaagccgaacgtgagggctatgaagtccagatcttgacagcagatcgcgatcttttccagcttttatctccgcgcatctcggtgttacacccggaagggcatcgtatcaccccggaatggctctgggagaaatatggtttgcgtcccgaacaatgggtggattttcgcgccttagcaggcgatccgagcgacaatattccgggagttaaaggtatcggcgagaagacggcgctcaagctccttaaagaatgggggtcgttggagaacttgcttaagaatttagatcaggtcaaaccagagtcagtgcgtgagaagattcttgctcacctcgaagacctcaaattaagccgcgaattgtcccgtgtacgcaccgatttgccgctcgaagttgatttcggtcgccgccgcgaacctgactgggagggtcttaaagcgtttttagagcgtcttgaatttggttcgctcttgcatgaattcggccttttagaaagcccgttactggccgaagaagcaccttggccaccgcccgagggcgcgtttttaggttaccgtttgagtcgcccggaaccgatgtgggccgaattactggctcttgcagcgtctgcccagggacgtgtgtatcgcgcggaagaccctcatggtgcgctccgcggcctcttcgaagtccgtggactccttgccaaagacttagctgttgttgcattgcgcgaaggtcttgatttacctccgactgatgatccaatgcttcttgcgtacctcttggacccgtcaaacacgacgcccgaaggcgtagcccgtcgttacggcggcgagtggaccgaagatgcagcgaaacgcgcgttattggccgaacgtttgcacgaaaatttattaggacgtttgcaaggcgaggaacgtctcctctggctttacgaagaagtggagaaaccattgagtcgcgtgctcgcgcatatggaagctaccggtgtcaaattagacgtggcgtatttggagaatctcagccttgaagttgctgcccacatgcgccgcttggaggaagaagtattccgtttagcaggccgttcctttcgccttaactctcgcgatcagttagaacgtgtgttgttcgatgaacttggtctccctcctatcggcaagacagagaagaccggtaaacgtagcacttcagcggcggttttagaagctcttcgcgaagtccatcccattgtggacaagatcttgcagtaccgcgaaatggcgaaattgaaaggcacctatattgaccgtcttccggcattagtccacccgaaaacgggacgcctccatacccgcttcaaccaaacagccacggcgaccggtcgtttgtcctcctctgatccaaaccttcagaatattccagtacgtaccccattgggccagaagatccgccgtgcgtttgtagctgaggagggttggcgtttagtggccctcgattatcgtcaaattgaattacgtgtccttgcccatctttctggcgatgagaacctcatccgcgtgtttcaggaaggcaaagacattcacactcaaacggcaagctggatgtttggattatcagctgaagcgatcgatcctttgatgcgtcgtgcagcgaagaccatcaatttcggtgttctctacggtatgagtgcctttcgtttgtcgcaggaattaggcattccctatgaagaagctcaggcgttcattcagaaatactttcaaagctatcccaaagttaaagcatggatcgagaagactctccgtgaaggccgcacacgtggttacgtagagaccttatttggacgtcgccgctatgttcccgatttaaacgctcgcgtgaaaggcaagcgtgaagccgccgaacgcatggcgttcaacatgcctgtacagggcacggcagctgacctcatgaaacttgcaatggtgcgcacgtttccacaattgcgtgaagttggtgcccgcatgctcttgcaggtccacgatgaactcttgttagaagcgccaaaagagcgtgcggaagaggtggcagccctcgcgaaagaagttatggaaggcgtgtggcccttagcggtgcctcttgaagtcgaagttggtattggcgaggattggctggctgccaaagga

SEQ ID NO: 6450 - protein, 841 aa, synthetic construct
  REGION 1..841: note = Variant of DNA polymerase I from Thermus sp. strain 2.9
MHHHHHHGGSGVLPVFEPKGRVLLVDGHHLAYRNFFALKGLTTSLGEPVQGVYGFAKSLLKALKEDGDVVIVVFDAKAPSFRHEAYEAYKAGRAPTPEDFPRQLALMKELVDLLGLERLEVPGFEADDVLATLAKKAEREGYEVQILTADRDLFQLLSPRISVLHPEGHRITPEWLWEKYGLRPEQWVDFRALAGDPSDNIPGVKGIGEKTALKLLKEWGSLENLLKNLDQVKPESVREKILAHLEDLKLSRELSRVRTDLPLEVDFGRRREPDWEGLKAFLERLEFGSLLHEFGLLESPLLAEEAPWPPPEGAFLGYRLSRPEPMWAELLALAASAQGRVYRAEDPHGALRGLFEVRGLLAKDLAVVALREGLDLPPTDDPMLLAYLLDPSNTTPEGVARRYGGEWTEDAAKRALLAERLHENLLGRLQGEERLLWLYEEVEKPLSRVLAHMEATGVKLDVAYLENLSLEVAAHMRRLEEEVFRLAGRSFRLNSRDQLERVLFDELGLPPIGKTEKTGKRSTSAAVLEALREVHPIVDKILQYREMAKLKGTYIDRLPALVHPKTGRLHTRFNQTATATGRLSSSDPNLQNIPVRTPLGQKIRRAFVAEEGWRLVALDYRQIELRVLAHLSGDENLIRVFQEGKDIHTQTASWMFGLSAEAIDPLMRRAAKTINFGVLYGMSAFRLSQELGIPYEEAQAFIQKYFQSYPKVKAWIEKTLREGRTRGYVETLFGRRRYVPDLNARVKGKREAAERMAFNMPVQGTAADLMKLAMVRTFPQLREVGARMLLQVHDELLLEAPKERAEEVAALAKEVMEGVWPLAVPLEVEVGIGEDWLAAKG

SEQ ID NO: 6451 - DNA, 2523 bp, synthetic construct
  misc_feature 1..2523: note = Variant of DNA polymerase I from Thermus sp. strain 2.9
  source 1..2523: mol_type = other DNA
atgcaccatcatcatcatcatggcggtagcggcgtgttaccggtgttcgagcctaaaggtcgcgtgcttctggttgatggccatcatctcgcgtatcgtaacttctttgccctgaaaggattaaccaccagcctgggcgagccggtacagggtgtctacggctttgcaaagtcgctcctgaaagctctgaaagaagacggtgatgtggtgattgttgtctttgatgcgaaagcgccaagttttcgccacgaagcgtacgaagcttacaaagccgggcgtgctccaacgccggaagactttcctcgccaattggcgcttatgaaggaattagtggatttgcttggcctcgaacgcttggaagttcccggtttcgaggcagacgacgtattagcgactctcgcaaagaaagccgaacgtgagggctatgaagtccagatcttgacagcagatcgcgatcttttccagcttttatctccgcgcatctcggtgttacacccggaagggcatcgtatcaccccggaatggctctgggagaaatatggtttgcgtcccgaacaatgggtggattttcgcgccttagcaggcgatccgagcgacaatattccgggagttaaaggtatcggcgagaagacggcgctcaagctccttaaagaatgggggtcgttggagaacttgcttaagaatttagatcaggtcaaaccagagtcagtgcgtgagaagattcttgctcacctcgaagacctcaaattaagccgcgaattgtcccgtgtacgcaccgatttgccgctcgaagttgatttcggtcgccgccgcgaacctgactgggagggtcttaaagcgtttttagagcgtcttgaatttggttcgctcttgcatgaattcggccttttagaaagcccgttactggccgaagaagcaccttggccaccgcccgagggcgcgtttttaggttaccgtttgagtcgcccggaaccgatgtgggccgaattactggctcttgcagcgtctgcccagggacgtgtgtatcgcgcggaagaccctcatggtgcgctccgcggcctcttcgaagtccgtggactccttgccaaagacttagctgttgttgcattgcgcgaaggtcttgatttacctccgactgatgatccaatgcttcttgcgtacctcttggacccgtcaaacacgacgcccgaaggcgtagcccgtcgttacggcggcgagtggaccgaagatgcagcgaaacgcgcgttattggccgaacgtttgcacgaaaatttattaggacgtttgcaaggcgaggaacgtctcctctggctttacgaagaagtggagaaaccattgagtcgcgtgctcgcgcatatggaagctaccggtgtcaaattagacgtggcgtatttggagaatctcagccttgaagttgctgcccacatgcgccgcttggaggaagaagtattccgtttagcaggccgttcctttcgccttaactctcgcgatcagttagaacgtgtgttgttcgatgaacttggtctccctcctatcggcaagacagagaagaccggtaaacgtagcacttcagcggcggttttagaagctcttcgcgaagtccatcccattgtggacaagatcttgcagtaccgcgaaatggcgaaattgaaaggcacctatattgaccgtcttccggcattagtccacccgaaaacgggacgcctccatacccgcttcaaccaaacagccacggcgaccggtcgtttgtcctcctctgatccaaaccttcagaatattccagtacgtaccccattgggccagaagatccgccgtgcgtttgtagctgaggagggttggcgtttagtggccctcgattatcgtcaaattgaattacgtgtccttgcccatctttctggcgatgagaacctcatccgcgtgtttcaggaaggcaaagacattcacactcaaacggcaagctggatgtttggattatcagctgaagcgatcgatcctttgatgcgtcgtgcagcgaagaccatcaatttcggtgttctctacggtatgagtgcctttcgtttgtcgtcggaattaggcattccctatgaagaagctcaggcgttcattcagaaatactttcaaagctatcccaaagttaaagcatggatcgagaagactctccgtgaaggccgcacacgtggttacgtagagaccttatttggacgtcgccgctatgttcccgatttaaacgctcgcgtgaaaggcaagcgtgaagccgccgaacgcatggcgttcaacatgcctgtacagggcacggcagctgacctcatgaaacttgcaatggtgcgcctttttccacaattgcgtgaagttggtgcccgcatgctcttgcaggtccacgatgaactcttgttagaagcgccaaaagagcgtgcggaagaggtggcagccctcgcgaaagaagttatggaaggcgtgtggcccttagcggtgcctcttgaagtcgaagttggtattggcgaggattggctggctgccaaagga

SEQ ID NO: 6452 - protein, 841 aa, synthetic construct
  REGION 1..841: note = Variant of DNA polymerase I from Thermus sp. strain 2.9
MHHHHHHGGSGVLPVFEPKGRVLLVDGHHLAYRNFFALKGLTTSLGEPVQGVYGFAKSLLKALKEDGDVVIVVFDAKAPSFRHEAYEAYKAGRAPTPEDFPRQLALMKELVDLLGLERLEVPGFEADDVLATLAKKAEREGYEVQILTADRDLFQLLSPRISVLHPEGHRITPEWLWEKYGLRPEQWVDFRALAGDPSDNIPGVKGIGEKTALKLLKEWGSLENLLKNLDQVKPESVREKILAHLEDLKLSRELSRVRTDLPLEVDFGRRREPDWEGLKAFLERLEFGSLLHEFGLLESPLLAEEAPWPPPEGAFLGYRLSRPEPMWAELLALAASAQGRVYRAEDPHGALRGLFEVRGLLAKDLAVVALREGLDLPPTDDPMLLAYLLDPSNTTPEGVARRYGGEWTEDAAKRALLAERLHENLLGRLQGEERLLWLYEEVEKPLSRVLAHMEATGVKLDVAYLENLSLEVAAHMRRLEEEVFRLAGRSFRLNSRDQLERVLFDELGLPPIGKTEKTGKRSTSAAVLEALREVHPIVDKILQYREMAKLKGTYIDRLPALVHPKTGRLHTRFNQTATATGRLSSSDPNLQNIPVRTPLGQKIRRAFVAEEGWRLVALDYRQIELRVLAHLSGDENLIRVFQEGKDIHTQTASWMFGLSAEAIDPLMRRAAKTINFGVLYGMSAFRLSSELGIPYEEAQAFIQKYFQSYPKVKAWIEKTLREGRTRGYVETLFGRRRYVPDLNARVKGKREAAERMAFNMPVQGTAADLMKLAMVRLFPQLREVGARMLLQVHDELLLEAPKERAEEVAALAKEVMEGVWPLAVPLEVEVGIGEDWLAAKG

SEQ ID NO: 6453 - DNA, 2523 bp, synthetic construct
  misc_feature 1..2523: note = Variant of DNA polymerase I from Thermus sp. strain 2.9
  source 1..2523: mol_type = other DNA
atgcaccatcatcatcatcatggcggtagcggcgtgttaccggtgttcgagcctaaaggtcgcgtgcttctggttgatggccatcatctcgcgtatcgtaacttctttgccctgaaaggattaaccaccagcctgggcgagccggtacagggtgtctacggctttgcaaagtcgctcctgaaagctctgaaagaagacggtgatgtggtgattgttgtctttgatgcgaaagcgccaagttttcgccacgaagcgtacgaagcttacaaagccgggcgtgctccaacgccggaagactttcctcgccaattggcgcttatgaaggaattagtggatttgcttggcctcgaacgcttggaagttcccggtttcgaggcagacgacgtattagcgactctcgcaaagaaagccgaacgtgagggctatgaagtccagatcttgacagcagatcgcgatcttttccagcttttatctccgcgcatctcggtgttacacccggaagggcatcgtatcaccccggaatggctctgggagaaatatggtttgcgtcccgaacaatgggtggattttcgcgccttagcaggcgatccgagcgacaatattccgggagttaaaggtatcggcgagaagacggcgctcaagctccttaaagaatgggggtcgttggagaacttgcttaagaatttagatcaggtcaaaccagagtcagtgcgtgagaagattcttgctcacctcgaagacctcaaattaagccgcgaattgtcccgtgtacgcaccgatttgccgctcgaagttgatttcggccgccgccgcgaacctgactgggagggtcttaaagcgtttttagagcgtcttgaatttggttcgctcttgcatgaattcggccttttagaaagcccgttactggccgaagaagcaccttggccaccgcccgagggcgcgtttttaggttaccgtttgagtcgcccggaaccgatgtgggccgaattactggctcttgcagcgtctgcccagggacgtgtgtatcgcgcggaagaccctcatggtgcgctccgcggcctcttcgaagtccgtggactccttgccaaagacttagctgttgttgcattgcgcgaaggtcttgatttacctccgactgatgatccaatgcttcttgcgtacctcttggacccgtcaaacacgacgcccgaaggcgtagcccgtcgttacggcggcgagtggaccgaagatgcagcgaaacgcgcgttattggccgaacgtttgcacgaaaatttattaggacgtttgcaaggcgaggaacgtctcctctggctttacgaagaagtggagaaaccattgagtcgcgtgctcgcgcatatggaagctaccggtgtcaaattagacgtggcgtatttggagaatctcagccttgaagttgctgcccacatgcgccgcttggaggaagaagtattccgtttagcaggccgctcctttcgccttaactctcgcgatcagttagaacgtgtgttgttcgatgaacttggtctccctcctatcggcaagacagagaagaccggtaaacgtagcacttcagcggcggttttagaagctcttcgcgaagtccatcccattgtggacaagatcttgcagtaccgcgaaatggcgaaattgaaaggcacctatattgaccgtcttccggcattagtccacccgaaaacgggacgcctccatacccgcttcaaccaaacagccacggcgaccggtcgtttgtcctcctctgatccaaaccttcagaatattccagtacgtaccccattgggccagaagatccgccgtgcgtttgtagctgaggagggttggcgtttagtggccctcgattatagtcaaattgaattacgtgtccttgcccatctttctggcgatgagaacctcatccgcgtgtttcaggaaggcaaagacattcacactcaaacggcaagctggatgtttggattatcagctgaagcgatcgatcctttgatgcgtcgtgcagcgaagaccatcaatttcggtgttctctacggtatgagtgcctttcgtttgtcgcaggaattaggcattccctatgaagaagctcaggcgttcattcagaaatactttcaaagctatcccaaagttaaagcatggatcgagaagactctccgtgaaggccgcacacgtggttacgtagagaccttatttggacgtcgccgctatgttcccgatttaaacgctcgcgtgaaaagcaaacgtgaagccgccgaacgcatggcgttcaacatgcctgtacagggcacggcagctgacctcatgaaacttgcaatggtgcgcctttttccacaattgcgtgaagttggtgcccgcatgctcttgcaggtccacgatgaactcttgttagaagcgccaaaagagcgtgcggaagaggtggcagccctcgcgaaagaagttatggaaggcgtgtggcccttagcggtgcctcttgaagtcgaagttggtattggcgaggattggctggctgccaaagga

SEQ ID NO: 6454 - protein, 841 aa, synthetic construct
  REGION 1..841: note = Variant of DNA polymerase I from Thermus sp. strain 2.9
MHHHHHHGGSGVLPVFEPKGRVLLVDGHHLAYRNFFALKGLTTSLGEPVQGVYGFAKSLLKALKEDGDVVIVVFDAKAPSFRHEAYEAYKAGRAPTPEDFPRQLALMKELVDLLGLERLEVPGFEADDVLATLAKKAEREGYEVQILTADRDLFQLLSPRISVLHPEGHRITPEWLWEKYGLRPEQWVDFRALAGDPSDNIPGVKGIGEKTALKLLKEWGSLENLLKNLDQVKPESVREKILAHLEDLKLSRELSRVRTDLPLEVDFGRRREPDWEGLKAFLERLEFGSLLHEFGLLESPLLAEEAPWPPPEGAFLGYRLSRPEPMWAELLALAASAQGRVYRAEDPHGALRGLFEVRGLLAKDLAVVALREGLDLPPTDDPMLLAYLLDPSNTTPEGVARRYGGEWTEDAAKRALLAERLHENLLGRLQGEERLLWLYEEVEKPLSRVLAHMEATGVKLDVAYLENLSLEVAAHMRRLEEEVFRLAGRSFRLNSRDQLERVLFDELGLPPIGKTEKTGKRSTSAAVLEALREVHPIVDKILQYREMAKLKGTYIDRLPALVHPKTGRLHTRFNQTATATGRLSSSDPNLQNIPVRTPLGQKIRRAFVAEEGWRLVALDYSQIELRVLAHLSGDENLIRVFQEGKDIHTQTASWMFGLSAEAIDPLMRRAAKTINFGVLYGMSAFRLSQELGIPYEEAQAFIQKYFQSYPKVKAWIEKTLREGRTRGYVETLFGRRRYVPDLNARVKSKREAAERMAFNMPVQGTAADLMKLAMVRLFPQLREVGARMLLQVHDELLLEAPKERAEEVAALAKEVMEGVWPLAVPLEVEVGIGEDWLAAKG

SEQ ID NO: 6455 - DNA, 2523 bp, synthetic construct
  misc_feature 1..2523: note = Variant of DNA polymerase I from Thermus sp. strain 2.9
  source 1..2523: mol_type = other DNA
atgcaccatcatcatcatcatggcggtagcggcgtgttaccggtgttcgagcctaaaggtcgcgtgcttctggttgatggccatcatctcgcgtatcgtaacttctttgccctgaaaggattaaccaccagcctgggcgagccggtacagggtgtctacggctttgcaaagtcgctcctgaaagctctgaaagaagacggtgatgtggtgattgttgtctttgatgcgaaagcgccaagttttcgccacgaagcgtacgaagcttacaaagccgggcgtgctccaacgccggaagactttcctcgccaattggcgcttatgaaggaattagtggatttgcttggcctcgaacgcttggaagttcccggtttcgaggcagacgacgtattagcgactctcgcaaagaaagccgaacgtgagggctatgaagtccagatcttgacagcagatcgcgatcttttccagcttttatctccgcgcatctcggtgttacacccggaagggcatcgtatcaccccggaatggctctgggagaaatatggtttgcgtcccgaacaatgggtggattttcgcgccttagcaggcgatccgagcgacaatattccgggagttaaaggtatcggcgagaagacggcgctcaagctccttaaagaatgggggtcgttggagaacttgcttaagaatttagatcaggtcaaaccagagtcagtgcgtgagaagattcttgctcacctcgaagacctcaaattaagccgcgaattgtcccgtgtacgcaccgatttgccgctcgaagttgatttcggtcgccgccgcgaacctgactgggagggtcttaaagcgtttttagagcgtcttgaatttggttcgctcttgcatgaattcggccttttagaaagcccgttactggccgaagaagcaccttggccaccgcccgagggcgcgtttttaggttaccgtttgagtcgcccggaaccgatgtgggccgaattactggctcttgcagcgtctgcccagggacgtgtgtatcgcgcggaagaccctcatggtgcgctccgcggcctcttcgaagtccgtggactccttgccaaagacttagctgttgttgcattgcgcgaaggtcttgatttacctccgactgatgatccaatgcttcttgcgtacctcttggacccgtcaaacacgacgcccgaaggcgtagcccgtcgttacggcggcgagtggaccgaagatgcagcgaaacgcgcgttattggccgaacgtttgcacgaaaatttattaggacgtttgcaaggcgaggaacgtctcctctggctttacgaagaagtggagaaaccattgagtcgcgtgctcgcgcatatggaagctaccggtgtcaaattagacgtggcgtatttggagaatctcagccttgaagttgctgcccacatgcgccgcttggaggaagaagtattccgtttagcaggccgttcctttcgccttaactctcgcgatcagttagaacgtgtgttgttcgatgaacttggtctccctcctatcggcaagacagagaagaccggtaaacgtagcacttcagcggcggttttagaagctcttcgcgaagtccatcccattgtggacaagatcttgcagtaccgcgaaatggcgaaattgaaaggcacctatattgaccgtcttccggcattagtccacccgaaaacgggacgcctccatacccgcttcaaccaaacagccacggcgaagggtcgtttgtcctcctctgatccaaaccttcagaatattccagtacgtaccccattgggccagaagatccgccgtgcgtttgtagctgaggagggttggcgtttagtggccctcgattatcgtcaaattgaattacgtgtccttgcccatctttctggcgatgagaacctcatccgcgtgtttcaggaaggcaaagacattcacactcaaacggcaagctggatgtttggattatcagctgaagcgatcgatcctttgatgcgtcgtgcagcgaagaccatcaatttcggtgttctctacggtatgagtgcctttcgtttgtcgcaggaattaggcattccctatgaagaagctcaggcgttcattcagaaatactttcaaagctatcccaaagttaaagcatggatcgagaagactctccgtgaaggccgcacacgtggttacgtagagaccttatttggacgtcgccgctatgttcccgatttaaacgctcgcgtgaaaggcaagcgtgaagccgccgaacgcatggcgttcaacatgcctgtacagggcacggcagctgacctcatgaaacttgcaatggtgcgcctttttccacaattgcgtgaagttggtgcccgcatgctcttgcaggtccacgatgaactcttgttagaagcgccaaaagagcgtgcggaagaggtggcagccctcgcgaaagaagttatggaaggcgtgtggcccttagcggtgcctcttgaagtcgaagttggtattggcgaggattggctggctgccaaagga

SEQ ID NO: 6456 - protein, 841 aa, synthetic construct
  REGION 1..841: note = Variant of DNA polymerase I from Thermus sp. strain 2.9
MHHHHHHGGSGVLPVFEPKGRVLLVDGHHLAYRNFFALKGLTTSLGEPVQGVYGFAKSLLKALKEDGDVVIVVFDAKAPSFRHEAYEAYKAGRAPTPEDFPRQLALMKELVDLLGLERLEVPGFEADDVLATLAKKAEREGYEVQILTADRDLFQLLSPRISVLHPEGHRITPEWLWEKYGLRPEQWVDFRALAGDPSDNIPGVKGIGEKTALKLLKEWGSLENLLKNLDQVKPESVREKILAHLEDLKLSRELSRVRTDLPLEVDFGRRREPDWEGLKAFLERLEFGSLLHEFGLLESPLLAEEAPWPPPEGAFLGYRLSRPEPMWAELLALAASAQGRVYRAEDPHGALRGLFEVRGLLAKDLAVVALREGLDLPPTDDPMLLAYLLDPSNTTPEGVARRYGGEWTEDAAKRALLAERLHENLLGRLQGEERLLWLYEEVEKPLSRVLAHMEATGVKLDVAYLENLSLEVAAHMRRLEEEVFRLAGRSFRLNSRDQLERVLFDELGLPPIGKTEKTGKRSTSAAVLEALREVHPIVDKILQYREMAKLKGTYIDRLPALVHPKTGRLHTRFNQTATAKGRLSSSDPNLQNIPVRTPLGQKIRRAFVAEEGWRLVALDYRQIELRVLAHLSGDENLIRVFQEGKDIHTQTASWMFGLSAEAIDPLMRRAAKTINFGVLYGMSAFRLSQELGIPYEEAQAFIQKYFQSYPKVKAWIEKTLREGRTRGYVETLFGRRRYVPDLNARVKGKREAAERMAFNMPVQGTAADLMKLAMVRLFPQLREVGARMLLQVHDELLLEAPKERAEEVAALAKEVMEGVWPLAVPLEVEVGIGEDWLAAKG

SEQ ID NO: 6457 - DNA, 2523 bp, synthetic construct
  misc_feature 1..2523: note = Variant of DNA polymerase I from Thermus sp. strain 2.9
  source 1..2523: mol_type = other DNA
atgcaccatcatcatcatcatggcggtagcggcgtgttaccggtgttcgagcctaaaggtcgcgtgcttctggttgatggccatcatctcgcgtatcgtaacttctttgccctgaaaggattaaccaccagcctgggcgagccggtacagggtgtctacggctttgcaaagtcgctcctgaaagctctgaaagaagacggtgatgtggtgattgttgtctttgatgcgaaagcgccaagttttcgccacgaagcgtacgaagcttacaaagccgggcgtgctccaacgccggaagactttcctcgccaattggcgcttatgaaggaattagtggatttgcttggcctcgaacgcttggaagttcccggtttcgaggcagacgacgtattagcgactctcgcaaagaaagccgaacgtgagggctatgaagtccagatcttgacagcagatcgcgatcttttccagcttttatctccgcgcatctcggtgttacacccggaagggcatcgtatcaccccggaatggctctgggagaaatatggtttgcgtcccgaacaatgggtggattttcgcgccttagcaggcgatccgagcgacaatattccgggagttaaaggtatcggcgagaagacggcgctcaagctccttaaagaatgggggtcgttggagaacttgcttaagaatttagatcaggtcaaaccagagtcagtgcgtgagaagattcttgctcacctcgaagacctcaaattaagccgcgaattgtcccgtgtacgcaccgatttgccgctcgaagttgatttcggtcgccgccgcgaacctgactgggagggtcttaaagcgtttttagagcgtcttgaatttggttcgctcttgcatgaattcggccttttagaaagcccgttactggccgaagaagcaccttggccaccgcccgagggcgcgtttttaggttaccgtttgagtcgcccggaaccgatgtgggccgaattactggctcttgcagcgtctgcccagggacgtgtgtatcgcgcggaagaccctcatggtgcgctccgcggcctcttcgaagtccgtggactccttgccaaagacttagctgttgttgcattgcgcgaaggtcttgatttacctccgactgatgatccaatgcttcttgcgtacctcttggacccgtcaaacacgacgcccgaaggcgtagcccgtcgttacggcggcgagtggaccgaagatgcagcgaaacgcgcgttattggccgaacgtttgcacgaaaatttattaggacgtttgcaaggcgaggaacgtctcctctggctttacgaagaagtggagaaaccattgagtcgcgtgctcgcgcatatggaagctaccggtgtcaaattagacgtggcgtatttggagaatctcagccttgaagttgctgcccacatgcgccgcttggaggaagaagtattccgtttagcaggccgttcctttcgccttaactctcgcgatcagttagaacgtgtgttgttcgatgaacttggtctccctcctatcggcaagacagagaagaccggtaaacgtagcacttcagcggcggttttagaagctcttcgcgaagtccatcccattgtggacaagatcttgcagtaccgcgaaatggcgaaattgaaaggcacctatattgaccgtcttccggcattagtccacccgaaaacgggacgcctccatacccgcttcaaccaaacagccacggcgaccggtcgtttgtcctcctctgatccaaaccttcagaatattccagtacgtaccccattgggccagaagatccgccgtgcgtttgtagctgaggagggttggcgtttagtggccctcgattatcgtcaaattgaattacgtgtccttgcccatctttctggcgatgagaacctcatccgcgtgtttcaggaaggcaaagacattcacactcaaacggcaagctggatgtttggattatcagctgaagcgatcgatcctttgatgcgtcgtgcagcgaagaccatcaatttcggtgttctctacggtatgagtgcctttcgtttgtcgcaggaacggggcattccctatgaagaagctcaggcgttcattcagaaatactttcaaagctatcccaaagttaaagcatggatcgagaagactctccgtgaaggccgcacacgtggttacgtagagaccttatttggacgtcgccgctatgttcccgatttaaacgctcgcgtgaaaggcaagcgtgaagccgccgaacgcatggcgttcaacatgcctgtacagggcacggcagctgacctcatgaaacttgcaatggtgcgcctttttccacaattgcgtgaagttggtgcccgcatgctcttgcaggtccacgatgaactcttgttagaagcgccaaaagagcgtgcggaagaggtggcagccctcgcgaaagaagttatggaaggcgtgtggcccttagcggtgcctcttgaagtcgaagttggtattggcgaggattggctggctgccaaagga

SEQ ID NO: 6458 - protein, 841 aa, synthetic construct
  REGION 1..841: note = Variant of DNA polymerase I from Thermus sp. strain 2.9
MHHHHHHGGSGVLPVFEPKGRVLLVDGHHLAYRNFFALKGLTTSLGEPVQGVYGFAKSLLKALKEDGDVVIVVFDAKAPSFRHEAYEAYKAGRAPTPEDFPRQLALMKELVDLLGLERLEVPGFEADDVLATLAKKAEREGYEVQILTADRDLFQLLSPRISVLHPEGHRITPEWLWEKYGLRPEQWVDFRALAGDPSDNIPGVKGIGEKTALKLLKEWGSLENLLKNLDQVKPESVREKILAHLEDLKLSRELSRVRTDLPLEVDFGRRREPDWEGLKAFLERLEFGSLLHEFGLLESPLLAEEAPWPPPEGAFLGYRLSRPEPMWAELLALAASAQGRVYRAEDPHGALRGLFEVRGLLAKDLAVVALREGLDLPPTDDPMLLAYLLDPSNTTPEGVARRYGGEWTEDAAKRALLAERLHENLLGRLQGEERLLWLYEEVEKPLSRVLAHMEATGVKLDVAYLENLSLEVAAHMRRLEEEVFRLAGRSFRLNSRDQLERVLFDELGLPPIGKTEKTGKRSTSAAVLEALREVHPIVDKILQYREMAKLKGTYIDRLPALVHPKTGRLHTRFNQTATATGRLSSSDPNLQNIPVRTPLGQKIRRAFVAEEGWRLVALDYRQIELRVLAHLSGDENLIRVFQEGKDIHTQTASWMFGLSAEAIDPLMRRAAKTINFGVLYGMSAFRLSQERGIPYEEAQAFIQKYFQSYPKVKAWIEKTLREGRTRGYVETLFGRRRYVPDLNARVKGKREAAERMAFNMPVQGTAADLMKLAMVRLFPQLREVGARMLLQVHDELLLEAPKERAEEVAALAKEVMEGVWPLAVPLEVEVGIGEDWLAAKG

SEQ ID NO: 6459 - DNA, 2523 bp, synthetic construct
  misc_feature 1..2523: note = Variant of DNA polymerase I from Thermus sp. strain 2.9
  source 1..2523: mol_type = other DNA
atgcaccatcatcatcatcatggcggtagcggcgtgttaccggtgttcgagcctaaaggtcgcgtgcttctggttgatggccatcatctcgcgtatcgtaacttctttgccctgaaaggattaaccaccagcctgggcgagccggtacagggtgtctacggctttgcaaagtcgctcctgaaagctctgaaagaagacggtgatgtggtgattgttgtctttgatgcgaaagcgccaagttttcgccacgaagcgtacgaagcttacaaagccgggcgtgctccaacgccggaagactttcctcgccaattggcgcttatgaaggaattagtggatttgcttggcctcgaacgcttggaagttcccggtttcgaggcagacgacgtattagcgactctcgcaaagaaagccgaacgtgagggctatgaagtccagatcttgacagcagatcgcgatcttttccagcttttatctccgcgcatctcggtgttacacccggaagggcatcgtatcaccccggaatggctctgggagaaatatggtttgcgtcccgaacaatgggtggattttcgcgccttagcaggcgatccgagcgacaatattccgggagttaaaggtatcggcgagaagacggcgctcaagctccttaaagaatgggggtcgttggagaacttgcttaagaatttagatcaggtcaaaccagagtcagtgcgtgagaagattcttgctcacctcgaagacctcaaattaagccgcgaattgtcccgtgtacgcaccgatttgccgctcgaagttgatttcggtcgccgccgcgaacctgactgggagggtcttaaagcgtttttagagcgtcttgaatttggttcgctcttgcatgaattcggccttttagaaagcccgttactggccgaagaagcaccttggccaccgcccgagggcgcgtttttaggttaccgtttgagtcgcccggaaccgatgtgggccgaattactggctcttgcagcgtctgcccagggacgtgtgtatcgcgcggaagaccctcatggtgcgctccgcggcctcttcgaagtccgtggactccttgccaaagacttagctgttgttgcattgcgcgaaggtcttgatttacctccgactgatgatccaatgcttcttgcgtacctcttggacccgtcaaacacgacgcccgaaggcgtagcccgtcgttacggcggcgagtggaccgaagatgcagcgaaacgcgcgttattggccgaacgtttgcacgaaaatttattaggacgtttgcaaggcgaggaacgtctcctctggctttacgaagaagtgtgtaaaccattgagtcgcgtgctcgcgcatatggaagctaccggtgtcaaattagacgtggcgtatttggagaatctcagccttgaagttgctgcccacatgcgccgcttggaggaagaagtattccgtttagcaggccgttcctttcgccttaactctcgcgatcagttagaacgtgtgttgttcgatgaacttggtctccctcctatcggcaagacagagaagaccggtaaacgtagcacttcagcggcggttttagaagctcttcgcgaagtccatcccattgtggacaagatcttgcagtaccgcgaaatggcgaaattgaaaggcacctatattgaccgtcttccggcattagtccacccgaaaacgggacgcctccatacccgcttcaaccaaacagccacggcgaccggtcgtttgtcctcctctgatccaaaccttcagaatattccagtacgtaccccattgggccagaagatccgccgtgcgtttgtagctgaggagggttggcgtttagtggccctcgattatcgtcaaattgaattacgtgtccttgcccatctttctggcgatgagaacctcatccgcgtgtttcaggaaggcaaagacattcacactcaaacggcaagctggatgtttggattatcagctgaagcgatcgatcctttgatgcgtcgtgcagcgaagaccatcaatttcggtgttctctacggtatgagtgcctttcgtttgtcgcaggaattaggcattccctatgaagaagctcaggcgttcattcagaaatactttcaaagctatcccaaagttaaagcatggatcgagaagactctccgtgaaggccgcacacgtggttacgtagagaccttatttggacgtcgccgctatgttcccgatttaaacgctcgcgtgaaaggcaagcgtgaagccgccgaacgcatggcgttcaacatgcctgtacagggcacggcagctgacctcatgaaacttgcaatggtgcgcctttttccacaattgcgtgaagttggtgcccgcatgctcttgcaggtccacgatgaactcttgttagaagcgccaaaagagcgtgcggaagaggtggcagccctcgcgaaagaagttatggaaggcgtgtggcccttagcggtgcctcttgaagtcgaagttggtattggcgaggattggctggctgccaaagga

SEQ ID NO: 6460 - protein, 841 aa, synthetic construct
  REGION 1..841: note = Variant of DNA polymerase I from Thermus sp. strain 2.9
MHHHHHHGGSGVLPVFEPKGRVLLVDGHHLAYRNFFALKGLTTSLGEPVQGVYGFAKSLLKALKEDGDVVIVVFDAKAPSFRHEAYEAYKAGRAPTPEDFPRQLALMKELVDLLGLERLEVPGFEADDVLATLAKKAEREGYEVQILTADRDLFQLLSPRISVLHPEGHRITPEWLWEKYGLRPEQWVDFRALAGDPSDNIPGVKGIGEKTALKLLKEWGSLENLLKNLDQVKPESVREKILAHLEDLKLSRELSRVRTDLPLEVDFGRRREPDWEGLKAFLERLEFGSLLHEFGLLESPLLAEEAPWPPPEGAFLGYRLSRPEPMWAELLALAASAQGRVYRAEDPHGALRGLFEVRGLLAKDLAVVALREGLDLPPTDDPMLLAYLLDPSNTTPEGVARRYGGEWTEDAAKRALLAERLHENLLGRLQGEERLLWLYEEVCKPLSRVLAHMEATGVKLDVAYLENLSLEVAAHMRRLEEEVFRLAGRSFRLNSRDQLERVLFDELGLPPIGKTEKTGKRSTSAAVLEALREVHPIVDKILQYREMAKLKGTYIDRLPALVHPKTGRLHTRFNQTATATGRLSSSDPNLQNIPVRTPLGQKIRRAFVAEEGWRLVALDYRQIELRVLAHLSGDENLIRVFQEGKDIHTQTASWMFGLSAEAIDPLMRRAAKTINFGVLYGMSAFRLSQELGIPYEEAQAFIQKYFQSYPKVKAWIEKTLREGRTRGYVETLFGRRRYVPDLNARVKGKREAAERMAFNMPVQGTAADLMKLAMVRLFPQLREVGARMLLQVHDELLLEAPKERAEEVAALAKEVMEGVWPLAVPLEVEVGIGEDWLAAKG

SEQ ID NO: 6461 - DNA, 2523 bp, synthetic construct
  misc_feature 1..2523: note = Variant of DNA polymerase I from Thermus sp. strain 2.9
  source 1..2523: mol_type = other DNA
atgcaccatcatcatcatcatggcggtagcggcgtgttaccggtgttcgagcctaaaggtcgcgtgcttctggttgatggccatcatctcgcgtatcgtaacttctttgccctgaaaggattaaccaccagccgcggcgagccggtacagggtgtctacggctttgcaaagtcgctcctgaaagctctgaaagaagacggtgatgtggtgattgttgtctttgatgcgaaagcgccaagttttcgccacgaagcgtacgaagcttacaaagccgggcgtgctccaacgccggaagactttcctcgccaattggcgcttatgaaggaattagtggatttgcttggcctcgaacgcttggaagttcccggtttcgaggcagacgacgtattagcgactctcgcaaagaaagccgaacgtgagggctatgaagtccagatcttgacagcagatcgcgatcttttccagcttttatctccgcgcatctcggtgttacacccggaagggcatcgtatcaccccggaatggctctgggagaaatatggtttgcgtcccgaacaatgggtggattttcgcgccttagcaggcgatccgagcgacaatattccgggagttaaaggtatcggcgagaagacggcgctcaagctccttaaagaatgggggtcgttggagaacttgcttaagaatttagatcaggtcaaaccagagtcagtgcgtgagaagattcttgctcacctcgaagacctcaaattaagccgcgaattgtcccgtgtacgcaccgatttgccgctcgaagttgatttcggccgccgccgcgaacctgactgggagggtcttaaagcgtttttagagcgtcttgaatttggttcgctcttgcatgaattcggccttttagaaagcccgttactggccgaagaagcaccttggccaccgcccgagggcgcgtttttaggttaccgtttgagtcgcccggaaccgatgtgggccgaattactggctcttgcagcgtctgcccagggacgtgtgtatcgcgcggaagaccctcatggtgcgctccgcggcctcttcgaagtccgtggactccttgccaaagacttagctgttgttgcattgcgcgaaggtcttgatttacctccgactgatgatccaatgcttcttgcgtacctcttggacccgtcaaacacgacgcccgaaggcgtagcccgtcgttacggcggcgagtggaccgaagatgcagcgaaacgcgcgttattggccgaacgtttgcacgcaaatttattaggacgtttgcaaggcgaggaacgtctcctctggctttacgaagaagtggagaaaccattgagtcgcgtgctcgcgcatatggaagctaccggtgtcaaattagacgtggcgtatttggagaatctcagccttgaagttgctgccgaaatgcgccgcttggaggaagaagtattccgtttagcaggccgttcctttcgccttaactctcgcgatcagttagaacgtgtgttgttcgatgaacttggtctccctcctatcggcaagacagagaagaccggtaaacgtagcacttcagcggcggttttagaagctcttcgcgaagtccatcccattgtggacaagatcttgcagtaccgcgaactggcgaaattgaaaggcacctatattgaccgtcttccggcattagtccacccgaaaacgggacgcctccatacccgcttcaaccaaacagccacggcgaccggtcgtttgtcctcctctgatccaaaccttcagaatattccagtacgtaccccattgggccagaagatccgccgtgcgtttgtagctgaggagggttggcgtttagtggccctcgattatcgtcaaattgaattacgtgtccttgcccatctttctggcgatgagaacctcatccgcgtgtttcaggaaggcaaagacattcacactcaaacggcaagctggatgtttggattatcagctgaagcgatcgatcctttgatgcgtcgtgcagcgaagaccatcaatttcggtgttctctacggtatgagtgcctttcgtttgtcgcaggaattaggcattccctatgaagaagctcaggcgttcattcagaaatactttcaaagctatcccaaagttaaagcatggatcgagaagactctcgaggaaggccgcacacgtggttacgtagagaccttatttggacgtcgccgctatgttcccgatttaaacgctcgcgtgaaaggcaaacgtgaagccgccgaacgcatggcgttcaacatgcctgtacagggcacggcagctgacctcatgaaacttgcaatggtgcgcctttttccacaattgcgtgaagttggtgcccgcatgctcttgcaggtccacgatgaactcttgttagaagcgccaaaagagcgtgcggaagaggtggcagccctcgcgaaagaagttatggaaggcgtgtggcccttagcggtgcctcttgaagtcgaagttggtattggcgaggattggctggctgccaaagga

SEQ ID NO: 6462 - protein, 841 aa, synthetic construct
  REGION 1..841: note = Variant of DNA polymerase I from Thermus sp. strain 2.9
MHHHHHHGGSGVLPVFEPKGRVLLVDGHHLAYRNFFALKGLTTSRGEPVQGVYGFAKSLLKALKEDGDVVIVVFDAKAPSFRHEAYEAYKAGRAPTPEDFPRQLALMKELVDLLGLERLEVPGFEADDVLATLAKKAEREGYEVQILTADRDLFQLLSPRISVLHPEGHRITPEWLWEKYGLRPEQWVDFRALAGDPSDNIPGVKGIGEKTALKLLKEWGSLENLLKNLDQVKPESVREKILAHLEDLKLSRELSRVRTDLPLEVDFGRRREPDWEGLKAFLERLEFGSLLHEFGLLESPLLAEEAPWPPPEGAFLGYRLSRPEPMWAELLALAASAQGRVYRAEDPHGALRGLFEVRGLLAKDLAVVALREGLDLPPTDDPMLLAYLLDPSNTTPEGVARRYGGEWTEDAAKRALLAERLHANLLGRLQGEERLLWLYEEVEKPLSRVLAHMEATGVKLDVAYLENLSLEVAAEMRRLEEEVFRLAGRSFRLNSRDQLERVLFDELGLPPIGKTEKTGKRSTSAAVLEALREVHPIVDKILQYRELAKLKGTYIDRLPALVHPKTGRLHTRFNQTATATGRLSSSDPNLQNIPVRTPLGQKIRRAFVAEEGWRLVALDYRQIELRVLAHLSGDENLIRVFQEGKDIHTQTASWMFGLSAEAIDPLMRRAAKTINFGVLYGMSAFRLSQELGIPYEEAQAFIQKYFQSYPKVKAWIEKTLEEGRTRGYVETLFGRRRYVPDLNARVKGKREAAERMAFNMPVQGTAADLMKLAMVRLFPQLREVGARMLLQVHDELLLEAPKERAEEVAALAKEVMEGVWPLAVPLEVEVGIGEDWLAAKG

SEQ ID NO: 6463 - DNA, 2523 bp, synthetic construct
  misc_feature 1..2523: note = Variant of DNA polymerase I from Thermus sp. strain 2.9
  source 1..2523: mol_type = other DNA
atgcaccatcatcatcatcatggcggtagcggcgtgttaccggtgttcgagcctaaaggtcgcgtgcttctggttgatggccatcatctcgcgtatcgtaacttctttgccctgaaaggattaaccaccagcctgggcgagccggtacagggtgtctacggctttgcaaagtcgctcctgaaagctctgaaagaagacggtgatgtggtgattgttgtctttgatgcgaaagcgccaagttttcgccacgaagcgtacgaagcttacaaagccgggcgtgctccaacgccggaagactttcctcgccaattggcgcttatgaaggaattagtggatttgcttggcctcgaacgcttggaagttcccggtttcgaggcagacgacgtattagcgactctcgcaaagaaagccgaacgtgagggctatgaagtccagatcttgacagcagatcgcgatcttttccagcttttatctccgcgcatctcggtgttacacccggaagggcatcgtatcaccccggaatggctctgggagaaatatggtttgcgtcccgaacaatgggtggattttcgcgccttagcaggcgatccgagcgacaatattccgggagttaaaggtatcggcgagaagacggcgctcaagctccttaaagaatgggggtcgttggagaacttgcttaagaatttagatcaggtcaaaccagagtcagtgcgtgagaagattcttgctcacctcgaagacctcaaattaagccgcgaattgtcccgtgtacgcaccgatttgccgctcgaagttgatttcggtcgccgccgcgaacctgactgggagggtcttaaagcgtttttagagcgtcttgaatttggttcgctcttgcatgaattcggccttttagaaagcccgttactggccgaagaagcaccttggccaccgcccgagggcgcgtttttaggttaccgtttgagtcgcccggaaccgatgtgggccgaattactggctcttgcagcgtctgcccagggacgtgtgtatcgcgcggaagaccctcatggtgcgctccgcggcctcttcgaagtccgtggactccttgccaaagacttagctgttgttgcattgcgcgaaggtcttgatttacctccgactgatgatccaatgcttcttgcgtacctcttggacccgtcaaacacgacgcccgaaggcgtagcccgtcgttacggcggcgagtggaccgaagatgcagcgaaacgcgcgttattggccgaacgtttgcacgaaaatttattaggacgtttgcaaggcgaggaacgtctcctctggctttacgaagaagtggagaaaccattgagtcgcgtgctcgcgcatatggaagctaccggtgtcaaattagacgtggcgtatttggagaatctcagccttgaagttgctgccgaaatgcgccgcttggaggaagaagtattccgtttagcaggccgttcctttcgccttaactctcgcgatcagttagaacgtgtgttgttcgatgaacttggtctccctcctatcggcaagacagagaagaccggtaaacgtagcacttcagcggcggttttagaagctcttcgcgaagtccatcccattgtggacaagatcttgcagtaccgcgaaatggcgaaattgaaaggcacctatattgaccgtcttccggcattagtccacccgaaaacgggacgcctccatacccgcttcaaccaaacagccacggcgaccggtcgtttgtcctcctctgatccaaaccttcagaatattccagtacgtaccccattgggccagaagatccgccgtgcgtttgtagctgaggagggttggcgtttagtggccctcgattatcgtcaaattgaattacgtgtccttgcccatctttctggcgatgagaacctcatccgcgtgtttcaggaaggcaaagacattcacactcaaacggcaagctggatgtttggattatcagctgaagcgatcgatcctttgatgcgtcgtgcagcgaagaccatcaatttcggtgttctctacggtatgagtgcctttcgtttgtcgcaggaattaggcattccctatgaagaagctcaggcgttcattcagaaatactttcaaagctatcccaaagttaaagcatggatcgagaagactctccgtgaaggccgcacacgtggttacgtagagaccttatttggacgtcgccgctatgttcccgatttaaacgctcgcgtgaaaggcaagcgtgaagccgccgaacgcatggcgttcaacatgcctgtacagggcacggcagctgacctcatgaaacttgcaatggtgcgcctttttccacaattgcgtgaagttggtgcccgcatgctcttgcaggtccacgatgaactcttgttagaagcgccaaaagagcgtgcggaagaggtggcagccctcgcgaaagaagttatggaaggcgtgtggcccttagcggtgcctcttgaagtcgaagttggtattggcgaggattggctggctgccaaagga

SEQ ID NO: 6464 - protein, 841 aa, synthetic construct
  REGION 1..841: note = Variant of DNA polymerase I from Thermus sp. strain 2.9
MHHHHHHGGSGVLPVFEPKGRVLLVDGHHLAYRNFFALKGLTTSLGEPVQGVYGFAKSLLKALKEDGDVVIVVFDAKAPSFRHEAYEAYKAGRAPTPEDFPRQLALMKELVDLLGLERLEVPGFEADDVLATLAKKAEREGYEVQILTADRDLFQLLSPRISVLHPEGHRITPEWLWEKYGLRPEQWVDFRALAGDPSDNIPGVKGIGEKTALKLLKEWGSLENLLKNLDQVKPESVREKILAHLEDLKLSRELSRVRTDLPLEVDFGRRREPDWEGLKAFLERLEFGSLLHEFGLLESPLLAEEAPWPPPEGAFLGYRLSRPEPMWAELLALAASAQGRVYRAEDPHGALRGLFEVRGLLAKDLAVVALREGLDLPPTDDPMLLAYLLDPSNTTPEGVARRYGGEWTEDAAKRALLAERLHENLLGRLQGEERLLWLYEEVEKPLSRVLAHMEATGVKLDVAYLENLSLEVAAEMRRLEEEVFRLAGRSFRLNSRDQLERVLFDELGLPPIGKTEKTGKRSTSAAVLEALREVHPIVDKILQYREMAKLKGTYIDRLPALVHPKTGRLHTRFNQTATATGRLSSSDPNLQNIPVRTPLGQKIRRAFVAEEGWRLVALDYRQIELRVLAHLSGDENLIRVFQEGKDIHTQTASWMFGLSAEAIDPLMRRAAKTINFGVLYGMSAFRLSQELGIPYEEAQAFIQKYFQSYPKVKAWIEKTLREGRTRGYVETLFGRRRYVPDLNARVKGKREAAERMAFNMPVQGTAADLMKLAMVRLFPQLREVGARMLLQVHDELLLEAPKERAEEVAALAKEVMEGVWPLAVPLEVEVGIGEDWLAAKG

SEQ ID NO: 6465 - DNA, 2523 bp, synthetic construct
  misc_feature 1..2523: note = Variant of DNA polymerase I from Thermus sp. strain 2.9
  source 1..2523: mol_type = other DNA
atgcaccatcatcatcatcatggcggtagcggcgtgttaccggtgttcgagcctaaaggtcgcgtgcttctggttgatggccatcatctcgcgtatcgtaacttctttgccctgaaaggattaaccaccagcctgggcgagccggtacagggtgtctacggctttgcaaagtcgctcctgaaagctctgaaagaagacggtgatgtggtgattgttgtctttgatgcgaaagcgccaagttttcgccacgaagcgtacgaagcttacaaagccgggcgtgctccaacgccggaagactttcctcgccaattggcgcttatgaaggaattagtggatttgcttggcctcgaacgcttggaagttcccggtttcgaggcagacgacgtattagcgactctcgcaaagaaagccgaacgtgagggctatgaagtccagatcttgacagcagatcgcgatcttttccagcttttatctccgcgcatctcggtgttacacccggaagggcatcgtatcaccccggaatggctctgggagaaatatggtttgcgtcccgaacaatgggtggattttcgcgccttagcaggcgatccgagcgacaatattccgggagttaaaggtatcggcgagaagacggcgctcaagctccttaaagaatgggggtcgttggagaacttgcttaagaatttagatcaggtcaaaccagagtcagtgcgtgagaagattcttgctcacctcgaagacctcaaattaagccgcgaattgtcccgtgtacgcaccgatttgccgctcgaagttgatttcggtcgccgccgcgaacctgactgggagggtcttaaagcgtttttagagcgtcttgaatttggttcgctcttgcatgaattcggccttttagaaagcccgttactggccgaagaagcaccttggccaccgcccgagggcgcgtttttaggttaccgtttgagtcgcccggaaccgatgtgggccgaattactggctcttgcagcgtctgcccagggacgtgtgtatcgcgcggaagaccctcatggtgcgctccgcggcctcttcgaagtccgtggactccttgccaaagacttagctgttgttgcattgcgcgaaggtcttgatttacctccgactgatgatccaatgcttcttgcgtacctcttggacccgtcaaacacgacgcccgaaggcgtagcccgtcgttacggcggcgagtggaccgaagatgcagcgaaacgcgcgttattggccgaacgtttgcacgaaaatttattaggacgtttgcaaggcgaggaacgtctcctctggctttacgaagaagtggagaaaccattgagtcgcgtgctcgcgcatatggaagctaccggtgtcaaattagacgtggcgtatttggagaatctcagccttgaagttgctgcccacatgcgccgcttggaggaagaagtattccgtttagcaggccgttcctttcgccttaactctcgcgatcagttagaacgtgtgttgttcgatgaacttggtctccctcctatcggcaagacagagaagaccggtaaacgtagcacttcagcggcggttttagaagctcttcgcgaagtccatcccattgtggacaagatcttgcagtaccgcggaatggcgaaattgaaaggcacctatattgaccgtcttccggcattagtccacccgaaaacgggacgcctccatacccgcttcaaccaaacagccacggcgaccggtcgtttgtcctcctctgatccaaaccttcagaatattccagtacgtaccccattgggccagaagatccgccgtgcgtttgtagctgaggagggttggcgtttagtggccctcgattatcgtcaaattgaattacgtgtccttgcccatctttctggcgatgagaacctcatccgcgtgtttcaggaaggcaaagacattcacactcaaacggcaagctggatgtttggattatcagctgaagcgatcgatcctttgatgcgtcgtgcagcgaagaccatcaatttcggtgttctctacggtatgagtgcctttcgtttgtcgcaggaattaggcattccctatgaagaagctgccgcgttcattcagaaatactttcaaagctatcccaaagttaaagcatggatcgagaagactctccgtgaaggccgcacacgtggttacgtagagaccttatttggacgtcgccgctatgttcccgatttaaacgctcgcgtgaaaggcaagcgtgaagccgccgaacgcatggcgttcaacatgcctgtacagggcacggcagctgacctcatgaaacttgcaatggtgcgcctttttccacaattgcgtgaagttggtgcccgcatgctcttgcaggtccacgatgaactcttgttagaagcgccaaaagagcgtgcggaagaggtggcagccctcgcgaaagaagttatggaaggcgtgtggcccttagcggtgcctcttgaagtcgaagttggtattggcgaggattggctggctgccaaagga

SEQ ID NO: 6466 - protein, 841 aa, synthetic construct
  REGION 1..841: note = Variant of DNA polymerase I from Thermus sp. strain 2.9
MHHHHHHGGSGVLPVFEPKGRVLLVDGHHLAYRNFFALKGLTTSLGEPVQGVYGFAKSLLKALKEDGDVVIVVFDAKAPSFRHEAYEAYKAGRAPTPEDFPRQLALMKELVDLLGLERLEVPGFEADDVLATLAKKAEREGYEVQILTADRDLFQLLSPRISVLHPEGHRITPEWLWEKYGLRPEQWVDFRALAGDPSDNIPGVKGIGEKTALKLLKEWGSLENLLKNLDQVKPESVREKILAHLEDLKLSRELSRVRTDLPLEVDFGRRREPDWEGLKAFLERLEFGSLLHEFGLLESPLLAEEAPWPPPEGAFLGYRLSRPEPMWAELLALAASAQGRVYRAEDPHGALRGLFEVRGLLAKDLAVVALREGLDLPPTDDPMLLAYLLDPSNTTPEGVARRYGGEWTEDAAKRALLAERLHENLLGRLQGEERLLWLYEEVEKPLSRVLAHMEATGVKLDVAYLENLSLEVAAHMRRLEEEVFRLAGRSFRLNSRDQLERVLFDELGLPPIGKTEKTGKRSTSAAVLEALREVHPIVDKILQYRGMAKLKGTYIDRLPALVHPKTGRLHTRFNQTATATGRLSSSDPNLQNIPVRTPLGQKIRRAFVAEEGWRLVALDYRQIELRVLAHLSGDENLIRVFQEGKDIHTQTASWMFGLSAEAIDPLMRRAAKTINFGVLYGMSAFRLSQELGIPYEEAAAFIQKYFQSYPKVKAWIEKTLREGRTRGYVETLFGRRRYVPDLNARVKGKREAAERMAFNMPVQGTAADLMKLAMVRLFPQLREVGARMLLQVHDELLLEAPKERAEEVAALAKEVMEGVWPLAVPLEVEVGIGEDWLAAKG

SEQ ID NO: 6467 - DNA, 2523 bp, synthetic construct
  misc_feature 1..2523: note = Variant of DNA polymerase I from Thermus sp. strain 2.9
  source 1..2523: mol_type = other DNA
atgcaccatcatcatcatcatggcggtagcggcgtgttaccggtgttcgagcctaaaggtcgcgtgcttctggttgatggccatcatctcgcgtatcgtaacttctttgccctgaaaggattaaccaccagcctgggcgagccggtacagggtgtctacggctttgcaaagtcgctcctgaaagctctgaaagaagacggtgatgtggtgattgttgtctttgatgcgaaagcgccaagttttcgccacgaagcgtacgaagcttacaaagccgggcgtgctccaacgccggaagactttcctcgccaattggcgcttatgaaggaattagtggatttgcttggcctcgaacgcttggaagttcccggtttcgaggcagacgacgtattagcgactctcgcaaagaaagccgaacgtgagggctatgaagtccagatcttgacagcagatcgcgatcttttccagcttttatctccgcgcatctcggtgttacacccggaagggcatcgtatcaccccggaatggctctgggagaaatatggtttgcgtcccgaacaatgggtggattttcgcgccttagcaggcgatccgagcgacaatattccgggagttaaaggtatcggcgagaagacggcgctcaagctccttaaagaatgggggtcgttggagaacttgcttaagaatttagatcaggtcaaaccagagtcagtgcgtgagaagattcttgctcacctcgaagacctcaaattaagccgcgaattgtcccgtgtacgcaccgatttgccgctcgaagttgatttcggtcgccgccgcgaacctgactgggagggtcttaaagcgtttttagagcgtcttgaatttggttcgctcttgcatgaattcggccttttagaaagcccgttactggccgaagaactgccttggccaccgcccgagggcgcgtttttaggttaccgtttgagtcgcccggaaccgatgtgggccgaattactggctcttgcagcgtctgcccagggacgtgtgtatcgcgcggaagaccctcatggtgcgctccgcggcctcttcgaagtccgtggactccttgccaaagacttagctgttgttgcattgcgcgaaggtcttgatttacctccgactgatgatccaatgcttcttgcgtacctcttggacccgtcaaacacgacgcccgaaggcgtagcccgtcgttacggcggcgagtggaccgaagatgcagcgaaacgcgcgttattggccgaacgtttgcacgaaaatttattaggacgtttgcaaggcgaggaacgtctcctctggctttacgaagaagtggagaaaccattgagtcgcgtgctcgcgcatatggaagctaccggtgtcaaattagacgtggcgtatttggagaatctcagccttgaagttgctgcccacatgcgccgcttggaggaagaagtattccgtttagcaggccgttcctttcgccttaactctcgcgatcagttagaacgtgtgttgttcgatgaacttggtctccctcctatcggcaagacagagaagaccggtaaacgtagcacttcagcggcggttttagaagctcttcgcgaagtccatcccattgtggacaagatcttgcagtaccgcgaaatggcgaaattgaaaggcacctatattgaccgtcttccggcattagtccacccgaaaacgggacgcctccatacccgcttcaaccaaacagccacggcgaccggtcgtttgtcctcctctgatccaaaccttcagaatattccagtacgtaccccattgggccagaagatccgccgtgcgtttgtagctgaggagggttggcgtttagtggccctcgattatcgtcaaattgaattacgtgtccttgcccatctttctggcgatgagaacctcatccgcgtgtttcaggaaggcaaagacattcacactcaaacggcaagctggatgtttggattatcagctgaagcgatcgatcctttgatgcgtcgtgcagcgaagaccatcaatttcggtgttctctacggtatgagtgcctttcgtttgtcgcaggaattaggcattccctatgaagaagctcaggcgttcattcagaaatactttcaaagctatcccaaagttaaagcatggatcgagaagactctccgtgaaggccgcacacgtggttacgtagagaccttatttggacgtcgccgctatgttcccgatttaaacgctcgcgtgaaaggcaagcgtgaagccgccgaacgcatggcgttcaacatgcctgtacagggcacggcagctgacctcatgaaacttgcaatggtgcgcctttttccacaattgcgtgaagttggtgcccgcatgctcttgcaggtccacgatgaactcttgttagaagcgccaaaagagcgtgcggaagaggtggcagccctcgcgaaagaagttatggaaggcgtgtggcccttagcggtgcctcttgaagtcgaagttggtattggcgaggattggctggctgccaaagga

SEQ ID NO: 6468 - protein, 841 aa, synthetic construct
  REGION 1..841: note = Variant of DNA polymerase I from Thermus sp. strain 2.9
MHHHHHHGGSGVLPVFEPKGRVLLVDGHHLAYRNFFALKGLTTSLGEPVQGVYGFAKSLLKALKEDGDVVIVVFDAKAPSFRHEAYEAYKAGRAPTPEDFPRQLALMKELVDLLGLERLEVPGFEADDVLATLAKKAEREGYEVQILTADRDLFQLLSPRISVLHPEGHRITPEWLWEKYGLRPEQWVDFRALAGDPSDNIPGVKGIGEKTALKLLKEWGSLENLLKNLDQVKPESVREKILAHLEDLKLSRELSRVRTDLPLEVDFGRRREPDWEGLKAFLERLEFGSLLHEFGLLESPLLAEELPWPPPEGAFLGYRLSRPEPMWAELLALAASAQGRVYRAEDPHGALRGLFEVRGLLAKDLAVVALREGLDLPPTDDPMLLAYLLDPSNTTPEGVARRYGGEWTEDAAKRALLAERLHENLLGRLQGEERLLWLYEEVEKPLSRVLAHMEATGVKLDVAYLENLSLEVAAHMRRLEEEVFRLAGRSFRLNSRDQLERVLFDELGLPPIGKTEKTGKRSTSAAVLEALREVHPIVDKILQYREMAKLKGTYIDRLPALVHPKTGRLHTRFNQTATATGRLSSSDPNLQNIPVRTPLGQKIRRAFVAEEGWRLVALDYRQIELRVLAHLSGDENLIRVFQEGKDIHTQTASWMFGLSAEAIDPLMRRAAKTINFGVLYGMSAFRLSQELGIPYEEAQAFIQKYFQSYPKVKAWIEKTLREGRTRGYVETLFGRRRYVPDLNARVKGKREAAERMAFNMPVQGTAADLMKLAMVRLFPQLREVGARMLLQVHDELLLEAPKERAEEVAALAKEVMEGVWPLAVPLEVEVGIGEDWLAAKG

SEQ ID NO: 6469 - DNA, 2523 bp, synthetic construct
  misc_feature 1..2523: note = Variant of DNA polymerase I from Thermus sp. strain 2.9
  source 1..2523: mol_type = other DNA
atgcaccatcatcatcatcatggcggtagcggcgtgttaccggtgttcgagcctaaaggtcgcgtgcttctggttgatggccatcatctcgcgtatcgtaacttctttgccctgaaaggattaaccaccagccgcggcgagccggtacagggtgtctacggctttgcaaagtcgctcctgaaagctctgaaagaagacggtgatgtggtgattgttgtctttgatgcgaaagcgccaagttttcgccacgaagcgtacgaagcttacaaagccgggcgtgctccaacgccggaagactttcctcgccaattggcgcttatgaaggaattagtggatttgcttggcctcgaacgcttggaagttcccggtttcgaggcagacgacgtattagcgactctcgcaaagaaagccgaacgtgagggctatgaagtccagatcttgacagcagatcgcgatcttttccagcttttatctccgcgcatctcggtgttacacccggaagggcatcgtatcaccccggaatggctctgggagaaatatggtttgcgtcccgaacaatgggtggattttcgcgccttagcaggcgatccgagcgacaatattccgggagttaaaggtatcggcgagaagacggcgctcaagctccttaaagaatgggggtcgttggagaacttgcttaagaatttagatcaggtcaaaccagagtcagtgcgtgagaagattcttgctcacctcgaagacctcaaattaagccgcgaattgtcccgtgtacgcaccgatttgccgctcgaagttgatttcggccgccgccgcgaacctgactgggagggtcttaaagcgtttttagagcgtcttgaatttggttcgctcttgcatgaattcggccttttagaaagcccgttactggccgaagaagcaccttggccaccgcccgagggcgcgtttttaggttaccgtttgagtcgcccggaaccgatgtgggccgaattactggctcttgcagcgtctgcccagggacgtgtgtatcgcgcggaagaccctcatggtgcgctccgcggcctcttcgaagtccgtggactccttgccaaagacttagctgttgttgcattgcgcgaaggtcttgatttacctccgactgatgatccaatgcttcttgcgtacctcttggacccgtcaaacacgacgcccgaaggcgtagcccgtcgttacggcggcgagtggaccgaagatgcagcgaaacgcgcgttattggccgaacgtttgcacgaaaatttattaggacgtttgcaaggcgaggaacgtctcctctggctttacgaagaagtggagaaaccattgagtcgcgtgctcgcgcatatggaagctaccggtgtcaaattagacgtggcgtatttggaggcccttcaccttgaagttgctgcccacatgcgccgcttggaggaagaagtattccgtttagcaggccgttcctttcgccttaactctcgcgatcagttagaacgtgtgttgttcgatgaacttggtctccctcctatcggcaagacagagaagaccggtaaacgtagcacttcagcggcggttttagaagctcttcgcgaagtccatcccattgtggacaagatcttgcagtaccgcgaaatggcgaaattgaaaggcacctatattgaccctcttccggcattagtccacccgaaaacgggacgcctccatacccgcttcaaccaaacagccacggcgaccggtcgtttgtcctcctctgatccaaaccttcagaatattccagtacgtaccccattgggccagaagatccgccgtgcgtttgtagctgaggagggttggcgtttagtggccctcgattatcgtcaaattgaattacgtgtccttgcccatctttctggcgatgagaacctcatccgcgtgtttcaggaaggcaaagacattcacactcaaacggcaagctggatgtttggattatcagctgaagcgatcgatcctttgatgcgtcgtgcagcgaagaccatcaatttcggtgttctctacggtatgagtgcctttcgtttgtcgcaggaattaggcattccctatgaagaagctcaggcgttcattcagaaatactttcaaagctatcccaaagttaaagcatggatcgagaagactctccgtgaaggccgcacacgtggttacgtagagaccttatttggacgtcgccgctatgttcccgatttaaacgctcgcgtgaaaggcaagcgtgaagccgccgaacgcatggcgttcaacatgcctgtacagggcacggcagctgacctcatgaaacttgcaatggtgcgcctttttccacaattgcgtgaagttggtgcccgcatgctcttgcaggtccacgatgaactcttgttagaagcgccaaaagagcgtgcggaagaggtggcagccctcgcgaaagaagttatggaaggcgtgtggcccttagcggtgcctcttgaagtcgaagttggtattggcgaggattggctggctgccaaagga

SEQ ID NO: 6470 - protein, 841 aa, synthetic construct
  REGION 1..841: note = Variant of DNA polymerase I from Thermus sp. strain 2.9
MHHHHHHGGSGVLPVFEPKGRVLLVDGHHLAYRNFFALKGLTTSRGEPVQGVYGFAKSLLKALKEDGDVVIVVFDAKAPSFRHEAYEAYKAGRAPTPEDFPRQLALMKELVDLLGLERLEVPGFEADDVLATLAKKAEREGYEVQILTADRDLFQLLSPRISVLHPEGHRITPEWLWEKYGLRPEQWVDFRALAGDPSDNIPGVKGIGEKTALKLLKEWGSLENLLKNLDQVKPESVREKILAHLEDLKLSRELSRVRTDLPLEVDFGRRREPDWEGLKAFLERLEFGSLLHEFGLLESPLLAEEAPWPPPEGAFLGYRLSRPEPMWAELLALAASAQGRVYRAEDPHGALRGLFEVRGLLAKDLAVVALREGLDLPPTDDPMLLAYLLDPSNTTPEGVARRYGGEWTEDAAKRALLAERLHENLLGRLQGEERLLWLYEEVEKPLSRVLAHMEATGVKLDVAYLEALHLEVAAHMRRLEEEVFRLAGRSFRLNSRDQLERVLFDELGLPPIGKTEKTGKRSTSAAVLEALREVHPIVDKILQYREMAKLKGTYIDPLPALVHPKTGRLHTRFNQTATATGRLSSSDPNLQNIPVRTPLGQKIRRAFVAEEGWRLVALDYRQIELRVLAHLSGDENLIRVFQEGKDIHTQTASWMFGLSAEAIDPLMRRAAKTINFGVLYGMSAFRLSQELGIPYEEAQAFIQKYFQSYPKVKAWIEKTLREGRTRGYVETLFGRRRYVPDLNARVKGKREAAERMAFNMPVQGTAADLMKLAMVRLFPQLREVGARMLLQVHDELLLEAPKERAEEVAALAKEVMEGVWPLAVPLEVEVGIGEDWLAAKG

SEQ ID NO: 6471 - DNA, 2523 bp, synthetic construct
  misc_feature 1..2523: note = Variant of DNA polymerase I from Thermus sp. strain 2.9
  source 1..2523: mol_type = other DNA
atgcaccatcatcatcatcatggcggtagcggcgtgttaccggtgttcgagcctaaaggtcgcgtgcttctggttgatggccatcatctcgcgtatcgtaacttctttgccctgaaaggattaaccaccagccgcggcgagccggtacagggtgtctacggctttgcaaagtcgctcctgaaagctctgaaagaagacggtgatgtggtgattgttgtctttgatgcgaaagcgccaagttttcgccacgaagcgtacgaagcttacaaagccgggcgtgctccaacgccggaagactttcctcgccaattggcgcttatgaaggaattagtggatttgcttggcctcgaacgcttggaagttcccggtttcgaggcagacgacgtattagcgactctcgcaaagaaagccgaacgtgagggctatgaagtccagatcttgacagcagatcgcgatcttttccagcttttatctccgcgcatctcggtgttacacccggaagggcatcgtatcaccccggaatggctctgggagaaatatggtttgcgtcccgaacaatgggtggattttcgcgccttagcaggcgatccgagcgacaatattccgggagttaaaggtatcggcgagaagacggcgctcaagctccttaaagaatgggggtcgttggagaacttgcttaagaatttagatcaggtcaaaccagagtcagtgcgtgagaagattcttgctcacctcgaagacctcaaattaagccgcgaattgtcccgtgtacgcaccgatttgccgctcgaagttgatttcggtcgccgccgcgaacctgactgggagggtcttaaagcgtttttagagcgtcttgaatttggttcgctcttgcatgaattcggccttttagaaagcccgttactggccgaagaagcaccttggccaccgcccgagggcgcgtttttaggttaccgtttgagtcgcccggaaccgatgtgggccgaattactggctcttgcagcgtctgcccagggacgtgtgtatcgcgcggaagaccctcatggtgcgctccgcggcctcttcgaagtccgtggactccttgccaaagacttagctgttgttgcattgcgcgaaggtcttgatttacctccgactgatgatccaatgcttcttgcgtacctcttggacccgtcaaacacgacgcccgaaggcgtagcccgtcgttacggcggcgagtggaccgaagatgcagcgaaacgcgcgttattggccgaacgtttgcacgcaaatttattaggacgtttgcaaggcgaggaacgtctcctctggctttacgaagaagtggagaaaccattgagtcgcgtgctcgcgcatatggaagctaccggtgtcaaattagacgtggcgtatttggagaatctcagccttgaagttgctgcccacatgcgccgcttggaggaagaagtattccgtttagcaggccactcctttcgccttaactctcgcgatcagttagaacgtgtgttgttcgatgaacttggtctccctcctatcggcaagacagagaagaccggtaaacgtagcacttcagcggcggttttagaagctcttcgcgaagtccatcccattgtggacaagatcttgcagtaccgcgaaatggcgaaattgaaaggcacctatattgaccgtcttccggcattagtccacccgaaaacgggacgcctccatacccgcttcaaccaaacagccacggcgaccggtcgtttgtcctcctctgatccaaaccttcagaatattccagtacgtaccccattgggccagaagatccgccgtgcgtttgtagctgaggagggttggcgtttagtggccctcgattatcgtcaaattgaattacgtgtccttgcccatctttctggcgatgagaacctcatccgcgtgtttcaggaaggcaaagacattcacactcaaacggcaagctggatgtttggattatcagctgaagcgatcgatcctttgatgcgtcgtgcagcgaagaccatcaatttcggtgttctctacggtatgagtgcctttcgtttgtcgcaggaattaggcattccctatgaagaagctcaggcgttcattcagaaatactttcaaagctatcccaaagttaaagcatggatcgagaagactctccgtgaaggccgcacacgtggttacgtagagaccttatttggacgtcgccgctatgttcccgatttaaacgctcgcgtgaaaggcaagcgtgaagccgccgaacgcatggcgttcaacatgcctgtacagggcacggcagctgacctcatgaaacttgcaatggtgcgcctttttccacaattgcgtgaagttggtgcccgcatgctcttgcaggtccacgatgaactcttgttagaagcgccaaaagagcgtgcggaagaggtggcagccctcgcgaaagaagttatggaaggcgtgtggcccttagcggtgcctcttgaagtcgaagttggtattggcgaggattggctggctgccaaagga

SEQ ID NO: 6472 - protein, 841 aa, synthetic construct
  REGION 1..841: note = Variant of DNA polymerase I from Thermus sp. strain 2.9
MHHHHHHGGSGVLPVFEPKGRVLLVDGHHLAYRNFFALKGLTTSRGEPVQGVYGFAKSLLKALKEDGDVVIVVFDAKAPSFRHEAYEAYKAGRAPTPEDFPRQLALMKELVDLLGLERLEVPGFEADDVLATLAKKAEREGYEVQILTADRDLFQLLSPRISVLHPEGHRITPEWLWEKYGLRPEQWVDFRALAGDPSDNIPGVKGIGEKTALKLLKEWGSLENLLKNLDQVKPESVREKILAHLEDLKLSRELSRVRTDLPLEVDFGRRREPDWEGLKAFLERLEFGSLLHEFGLLESPLLAEEAPWPPPEGAFLGYRLSRPEPMWAELLALAASAQGRVYRAEDPHGALRGLFEVRGLLAKDLAVVALREGLDLPPTDDPMLLAYLLDPSNTTPEGVARRYGGEWTEDAAKRALLAERLHANLLGRLQGEERLLWLYEEVEKPLSRVLAHMEATGVKLDVAYLENLSLEVAAHMRRLEEEVFRLAGHSFRLNSRDQLERVLFDELGLPPIGKTEKTGKRSTSAAVLEALREVHPIVDKILQYREMAKLKGTYIDRLPALVHPKTGRLHTRFNQTATATGRLSSSDPNLQNIPVRTPLGQKIRRAFVAEEGWRLVALDYRQIELRVLAHLSGDENLIRVFQEGKDIHTQTASWMFGLSAEAIDPLMRRAAKTINFGVLYGMSAFRLSQELGIPYEEAQAFIQKYFQSYPKVKAWIEKTLREGRTRGYVETLFGRRRYVPDLNARVKGKREAAERMAFNMPVQGTAADLMKLAMVRLFPQLREVGARMLLQVHDELLLEAPKERAEEVAALAKEVMEGVWPLAVPLEVEVGIGEDWLAAKG

SEQ ID NO: 6473 - DNA, 2523 bp, synthetic construct
  misc_feature 1..2523: note = Variant of DNA polymerase I from Thermus sp. strain 2.9
  source 1..2523: mol_type = other DNA
atgcaccatcatcatcatcatggcggtagcggcgtgttaccggtgttcgagcctaaaggtcgcgtgcttctggttgatggccatcatctcgcgtatcgtaacttctttgccctgaaaggattaaccaccagcctgggcgagccggtacagggtgtctacggctttgcaaagtcgctcctgaaagctctgaaagaagacggtgatgtggtgattgttgtctttgatgcgaaagcgccaagttttcgccacgaagcgtacgaagcttacaaagccgggcgtgctccaacgccggaagactttcctcgccaattggcgcttatgaaggaattagtggatttgcttggcctcgaacgcttggaagttcccggtttcgaggcagacgacgtattagcgactctcgcaaagaaagccgaacgtgagggctatgaagtccagatcttgacagcagatcgcgatcttttccagcttttatctccgcgcatctcggtgttacacccggaagggcatcgtatcaccccggaatggctctgggagaaatatggtttgcgtcccgaacaatgggtggattttcgcgccttagcaggcgatccgagcgacaatattccgggagttaaaggtatcggcgagaagacggcgctcaagctccttaaagaatgggggtcgttggagaacttgcttaagaatttagatcaggtcaaaccagagtcagtgcgtgagaagattcttgctcacctcgaagacctcaaattaagccgcgaattgtcccgtgtacgcaccgatttgccgctcgaagttgatttcggtcgccgccgcgaacctgactgggagggtcttaaagcgtttttagagcgtcttgaatttggttcgctcttgcatgaattcggccttttagaaagcccgttactggccgaagaagcaccttggccaccgcccgagggcgcgtttttaggttaccgtttgagtcgcccggaaccgatgtgggccgaattactggctcttgcagcgtctgcccagggacgtgtgtatcgcgcggaagaccctcatggtgcgctccgcggcctcttcgaagtccgtggactccttgccaaagacttagctgttgttgcattgcgcgaaggtcttgatttacctccgactgatgatccaatgcttcttgcgtacctcttggacccgtcaaacacgacgcccgaaggcgtagcccgtcgttacggcggcgagtggaccgaagatgcagcgaaacgcgcgttattggccgaacgtttgcacgaaaatttattaggacgtttgcaaggcgaggaacgtctcctctggctttacgaagaagtggagaaaccattgagtcgcgtgctcgcgcatatggaagctaccggtgtcaaattagacgtggcgtatttggagaatctcagccttgaagttgctgcccacatgcgccgcttggaggaagaagtattccgtttagcaggccgttcctttcgccttaactctcgcgatcagttagaacgtgtgttgttcgatgaacttggtctccctcctatcggcaagacagagaagaccggtaaacgtagcacttcagcggcggttttagaagctcttcgcgaagtccatcccattgtggacaagatcttgcagtaccgcgaaatggcgaaattgaaaggcacctatattgaccgtcttccggcattagtccacccgaaaacgggacgcctccatacccgcttcaaccaaacagccacggcgaccggtcgtttgtcctcctctacgccaaaccttcagaatattccagtacgtaccccattgggccagaagatccgccgtgcgtttgtagctgaggagggttggcgtttagtggccctcgattatcgtcaaattgaattacgtgtccttgcccatctttctggcgatgagaacctcatccgcgtgtttcaggaaggcaaagacattcacactcaaacggcaagctggatgtttggattatcagctgaagcgatcgatcctttgatgcgtcgtgcagcgaagaccatcaatttcggtgttctctacggtatgagtgcctttcgtttgtcgcaggaattaggcattccctatgaagaagctcaggcgttcattcagaaatactttcaaagctatcccaaagttaaagcatggatcgagaagactctccgtgaaggccgcacacgtggttacgtagagaccttatttggacgtcgccgctatgttcccgatttaaacgctcgcgtgaaaggcaagcgtgaagccgccgaacgcatggcgttcaacatgcctgtacagggcacggcagctgacctcatgaaacttgcaatggtgcgcctttttccacaattgcgtgaagttggtgcccgcatgctcttgcaggtccacgatgaactcttgttagaagcgccaaaagagcgtgcggaagaggtggcagccctcgcgaaagaagttatggaaggcgtgtggcccttagcggtgcctcttgaagtcgaagttggtattggcgaggattggctggctgccaaagga

SEQ ID NO: 6474 - protein, 841 aa, synthetic construct
  REGION 1..841: note = Variant of DNA polymerase I from Thermus sp. strain 2.9
MHHHHHHGGSGVLPVFEPKGRVLLVDGHHLAYRNFFALKGLTTSLGEPVQGVYGFAKSLLKALKEDGDVVIVVFDAKAPSFRHEAYEAYKAGRAPTPEDFPRQLALMKELVDLLGLERLEVPGFEADDVLATLAKKAEREGYEVQILTADRDLFQLLSPRISVLHPEGHRITPEWLWEKYGLRPEQWVDFRALAGDPSDNIPGVKGIGEKTALKLLKEWGSLENLLKNLDQVKPESVREKILAHLEDLKLSRELSRVRTDLPLEVDFGRRREPDWEGLKAFLERLEFGSLLHEFGLLESPLLAEEAPWPPPEGAFLGYRLSRPEPMWAELLALAASAQGRVYRAEDPHGALRGLFEVRGLLAKDLAVVALREGLDLPPTDDPMLLAYLLDPSNTTPEGVARRYGGEWTEDAAKRALLAERLHENLLGRLQGEERLLWLYEEVEKPLSRVLAHMEATGVKLDVAYLENLSLEVAAHMRRLEEEVFRLAGRSFRLNSRDQLERVLFDELGLPPIGKTEKTGKRSTSAAVLEALREVHPIVDKILQYREMAKLKGTYIDRLPALVHPKTGRLHTRFNQTATATGRLSSSTPNLQNIPVRTPLGQKIRRAFVAEEGWRLVALDYRQIELRVLAHLSGDENLIRVFQEGKDIHTQTASWMFGLSAEAIDPLMRRAAKTINFGVLYGMSAFRLSQELGIPYEEAQAFIQKYFQSYPKVKAWIEKTLREGRTRGYVETLFGRRRYVPDLNARVKGKREAAERMAFNMPVQGTAADLMKLAMVRLFPQLREVGARMLLQVHDELLLEAPKERAEEVAALAKEVMEGVWPLAVPLEVEVGIGEDWLAAKG

SEQ ID NO: 6475 - DNA, 2523 bp, synthetic construct
  misc_feature 1..2523: note = Variant of DNA polymerase I from Thermus sp. strain 2.9
  source 1..2523: mol_type = other DNA
atgcaccatcatcatcatcatggcggtagcggcgtgttaccggtgttcgagcctaaaggtcgcgtgcttctggttgatggccatcatctcgcgtatcgtaacttctttgccctgaaaggattaaccaccagcctgggcgagccggtacagggtgtctacggctttgcaaagtcgctcctgaaagctctgaaagaagacggtgatgtggtgattgttgtctttgatgcgaaagcgccaagttttcgccacgaagcgtacgaagcttacaaagccgggcgtgctccaacgccggaagactttcctcgccaattggcgcttatgaaggaattagtggatttgcttggcctcgaacgcttggaagttcccggtttcgaggcagacgacgtattagcgactctcgcaaagaaagccgaacgtgagggctatgaagtccagatcttgacagcagatcgcgatcttttccagcttttatctccgcgcatctcggtgttacacccggaagggcatcgtatcaccccggaatggctctgggagaaatatggtttgcgtcccgaacaatgggtggattttcgcgccttagcaggcgatccgagcgacaatattccgggagttaaaggtatcggcgagaagacggcgctcaagctccttaaagaatgggggtcgttggagaacttgcttaagaatttagatcaggtcaaaccagagtcagtgcgtgagaagattcttgctcacctcgaagacctcaaattaagccgcgaattgtcccgtgtacgcaccgatttgccgctcgaagttgatttcggtcgccgccgcgaacctgactgggagggtcttaaagcgtttttagagcgtcttgaatttggttcgctcttgcatgaattcggccttttagaaagcccgttactggccgaagaagcaccttggccaccgcccgagggcgcgtttttaggttaccgtttgagtcgcccggaaccgatgtgggccgaattactggctcttgcagcgtctgcccagggacgtgtgtatcgcgcggaagaccctcatggtgcgctccgcggcctcttcgaagtccgtggactccttgccaaagacttagctgttgttgcattgcgcgaaggtcttgatttacctccgactgatgatccaatgcttcttgcgtacctcttggacccgtcaaacacgacgccccctggcgtagcccgtcgttacggcggcgagtggaccgaagatgcagcgaaacgcgcgttattggccgaacgtttgcacgaaaatttattaggacgtttgcaaggcgaggaacgtctcctctggctttacgaagaagtggagaaaccattgagtcgcgtgctcgcgcatatggaagctaccggtgtcaaattagacgtggcgtatttggagaatctcagccttgaagttgctgcccacatgcgccgcttggaggaagaagtattccgtttagcaggccgttcctttcgccttaactctcgcgatcagttagaacgtgtgttgttcgatgaacttggtctccctcctatcggcaagacagagaagaccggtaaacgtagcacttcagcggcggttttagaagctcttcgcgaagtccatcccattgtggacaagatcttgcagtaccgcgaaatggcgaaattgaaaggcacctatattgaccgtcttccggcattagtccacccgaaaacgggacgcctccatacccgcttcaaccaaacagccacggcgaccggtcgtttgtcctcctctgatccaaaccttcagaatattccagtacgtaccccattgggccagaagatccgccgtgcgtttgtagctgaggagggttggcgtttagtggccctcgattatcgtcaaattgaattacgtgtccttgcccatctttctggcgatgagaacctcatccgcgtgtttcaggaaggcaaagacattcacactcaaacggcaagctggatgtttggattatcagctgaagcgatcgatcctttgatgcgtcgtgcagcgaagaccatcaatttcggtgttctctacggtatgagtgcctttcgtttgtcgcaggaattaggcattccctatgaagaagctcaggcgttcattcagaaatactttcaaagctatcccaaagttaaagcatggatcgagaagactctccgtgaaggccgcacacgtggttacgtagagaccttatttggacgtcgccgctatgttcccgatttaaacgctcgcgtgaaaggcaagcgtgaagccgccgaacgcatggcgttcaacatgcctgtacagggcacggcagctgacctcatgaaacttgcaatggtgcgcctttttccacaattgcgtgaagttggtgcccgcatgctcttgcaggtccacgatgaactcttgttagaagcgccaaaagagcgtgcggaagaggtggcagccctcgcgaaagaagttatggaaggcgtgtggcccttagcggtgcctcttgaagtcgaagttggtattggcgaggattggctggctgccaaagga

SEQ ID NO: 6476 - protein, 841 aa, synthetic construct
  REGION 1..841: note = Variant of DNA polymerase I from Thermus sp. strain 2.9
MHHHHHHGGSGVLPVFEPKGRVLLVDGHHLAYRNFFALKGLTTSLGEPVQGVYGFAKSLLKALKEDGDVVIVVFDAKAPSFRHEAYEAYKAGRAPTPEDFPRQLALMKELVDLLGLERLEVPGFEADDVLATLAKKAEREGYEVQILTADRDLFQLLSPRISVLHPEGHRITPEWLWEKYGLRPEQWVDFRALAGDPSDNIPGVKGIGEKTALKLLKEWGSLENLLKNLDQVKPESVREKILAHLEDLKLSRELSRVRTDLPLEVDFGRRREPDWEGLKAFLERLEFGSLLHEFGLLESPLLAEEAPWPPPEGAFLGYRLSRPEPMWAELLALAASAQGRVYRAEDPHGALRGLFEVRGLLAKDLAVVALREGLDLPPTDDPMLLAYLLDPSNTTPPGVARRYGGEWTEDAAKRALLAERLHENLLGRLQGEERLLWLYEEVEKPLSRVLAHMEATGVKLDVAYLENLSLEVAAHMRRLEEEVFRLAGRSFRLNSRDQLERVLFDELGLPPIGKTEKTGKRSTSAAVLEALREVHPIVDKILQYREMAKLKGTYIDRLPALVHPKTGRLHTRFNQTATATGRLSSSDPNLQNIPVRTPLGQKIRRAFVAEEGWRLVALDYRQIELRVLAHLSGDENLIRVFQEGKDIHTQTASWMFGLSAEAIDPLMRRAAKTINFGVLYGMSAFRLSQELGIPYEEAQAFIQKYFQSYPKVKAWIEKTLREGRTRGYVETLFGRRRYVPDLNARVKGKREAAERMAFNMPVQGTAADLMKLAMVRLFPQLREVGARMLLQVHDELLLEAPKERAEEVAALAKEVMEGVWPLAVPLEVEVGIGEDWLAAKG

SEQ ID NO: 6477 - DNA, 2523 bp, synthetic construct
  misc_feature 1..2523: note = Variant of DNA polymerase I from Thermus sp. strain 2.9
  source 1..2523: mol_type = other DNA
atgcaccatcatcatcatcatggcggtagcggcgtgttaccggtgttcgagcctaaaggtcgcgtgcttctggttgatggccatcatctcgcgtatcgtaacttctttgccctgaaaggattaaccaccagcctgggcgagccggtacagggtgtctacggctttgcaaagtcgctcctgaaagctctgaaagaagacggtgatgtggtgattgttgtctttgatgcgaaagcgccaagttttcgccacgaagcgtacgaagcttacaaagccgggcgtgctccaacgccggaagactttcctcgccaattggcgcttatgaaggaattagtggatttgcttggcctcgaacgcttggaagttcccggtttcgaggcagacgacgtattagcgactctcgcaaagaaagccgaacgtgagggctatgaagtccagatcttgacagcagatcgcgatcttttccagcttttatctccgcgcatctcggtgttacacccggaagggcatcgtatcaccccggaatggctctgggagaaatatggtttgcgtcccgaacaatgggtggattttcgcgccttagcaggcgatccgagcgacaatattccgggagttaaaggtatcggcgagaagacggcgctcaagctccttaaagaatgggggtcgttggagaacttgcttaagaatttagatcaggtcaaaccagagtcagtgcgtgagaagattcttgctcacctcgaagacctcaaattaagccgcgaattgtcccgtgtacgcaccgatttgccgctcgaagttgatttcggtcgccgccgcgaacctgactgggagggtcttaaagcgtttttagagcgtcttgaatttggttcgctcttgcatgaattcggccttttagaaagcccgttactggccgaagaagcaccttggccaccgcccgagggcgcgtttttaggttaccgtttgagtcgcccggaaccgatgtgggccgaattactggctcttgcagcgtctgcccagggacgtgtgtatcgcgcggaagaccctcatggtgcgctccgcggcctcttcgaagtccgtggactccttgccaaagacttagctgttgttgcattgcgcgaaggtcttgatttacctccgactgatgatccaatgcttcttgcgtacctcttggacccgtcaaacacgacgcccgaaggcgtagcccgtcgttacggcggcgagtggaccgaagatgcagcgaaacgcgcgttattggccgaacgtttgcacgaaaatttattaggacgtttgcaaggcgaggaacgtctcctctggctttacgaagaagtggagaaaccattgagtcgcgtgctcgcgcatatggaagctaccggtgtcaaattagacgtggcgtatttggagaatctcagccttgaagttgctgcccacatgcgccgcttggaggaagaagtattccgtttagcaggccgttcctttcgccttaactctcgcgatcagttagaacgtgtgttgttcgatgaacttggtctccctcctatcggcaagacagagaagaccggtaaacgtagcacttcagcggcggttttagaagctcttcgcgaagtccatcccattgtggacaagatcttgcagtaccgcgaaatggcgaaattgaaaggcacctatattgaccgtcttccggcattagtccacccgaaaacgggacgcctccatacccgcttcaaccaaacagccacggcgaccggtcgtttgtcctcctctgatccaaaccttcagaatattccagtacgtaccccattgggccagaagatccgccgtgcgtttgtagctgaggagggttggcgtttagtggccctcgattatcgtcaaattgaattacgtgtccttgcctttctttctggcgatgagaacctcatccgcgtgtttcaggaaggcaaagacattcacactcaaacggcaagctggatgtttggattatcagctgaagcgatcgatcctttgatgcgtcgtgcagcgaagaccatcaatttcggtgttctctacggtatgagtgcctttcgtttgtcgcaggaattaggcattccctatgaagaagctcaggcgttcattcagaaatactttcaaagctatcccaaagttaaagcatggatcgagaagactctccgtgaaggccgcacacgtggttacgtagagaccttatttggacgtcgccgctatgttcccgatttaaacgctcgcgtgaaaggcaagcgtgaagccgccgaacgcatggcgttcaacatgcctgtacagggcacggcagctgacctcatgaaacttgcaatggtgcgcctttttccacaattgcgtgaagttggtgcccgcatgctcttgcaggtccacgatgaactcttgttagaagcgccaaaagagcgtgcggaagaggtggcagccctcgcgaaagaagttatggaaggcgtgtggcccttagcggtgcctcttgaagtcgaagttggtattggcgaggattggctggctgccaaagga

SEQ ID NO: 6478 - protein, 841 aa, synthetic construct
  REGION 1..841: note = Variant of DNA polymerase I from Thermus sp. strain 2.9
MHHHHHHGGSGVLPVFEPKGRVLLVDGHHLAYRNFFALKGLTTSLGEPVQGVYGFAKSLLKALKEDGDVVIVVFDAKAPSFRHEAYEAYKAGRAPTPEDFPRQLALMKELVDLLGLERLEVPGFEADDVLATLAKKAEREGYEVQILTADRDLFQLLSPRISVLHPEGHRITPEWLWEKYGLRPEQWVDFRALAGDPSDNIPGVKGIGEKTALKLLKEWGSLENLLKNLDQVKPESVREKILAHLEDLKLSRELSRVRTDLPLEVDFGRRREPDWEGLKAFLERLEFGSLLHEFGLLESPLLAEEAPWPPPEGAFLGYRLSRPEPMWAELLALAASAQGRVYRAEDPHGALRGLFEVRGLLAKDLAVVALREGLDLPPTDDPMLLAYLLDPSNTTPEGVARRYGGEWTEDAAKRALLAERLHENLLGRLQGEERLLWLYEEVEKPLSRVLAHMEATGVKLDVAYLENLSLEVAAHMRRLEEEVFRLAGRSFRLNSRDQLERVLFDELGLPPIGKTEKTGKRSTSAAVLEALREVHPIVDKILQYREMAKLKGTYIDRLPALVHPKTGRLHTRFNQTATATGRLSSSDPNLQNIPVRTPLGQKIRRAFVAEEGWRLVALDYRQIELRVLAFLSGDENLIRVFQEGKDIHTQTASWMFGLSAEAIDPLMRRAAKTINFGVLYGMSAFRLSQELGIPYEEAQAFIQKYFQSYPKVKAWIEKTLREGRTRGYVETLFGRRRYVPDLNARVKGKREAAERMAFNMPVQGTAADLMKLAMVRLFPQLREVGARMLLQVHDELLLEAPKERAEEVAALAKEVMEGVWPLAVPLEVEVGIGEDWLAAKG

SEQ ID NO: 6479 - DNA, 2523 bp, synthetic construct
  misc_feature 1..2523: note = Variant of DNA polymerase I from Thermus sp. strain 2.9
  source 1..2523: mol_type = other DNA
atgcaccatcatcatcatcatggcggtagcggcgtgttaccggtgttcgagcctaaaggtcgcgtgcttctggttgatggccatcatctcgcgtatcgtaacttctttgccctgaaaggattaaccaccagcctgggcgagccggtacagggtgtctacggctttgcaaagtcgctcctgaaagctctgaaagaagacggtgatgtggtgattgttgtctttgatgcgaaagcgccaagttttcgccacgaagcgtacgaagcttacaaagccgggcgtgctccaacgccggaagactttcctcgccaattggcgcttatgaaggaattagtggatttgcttggcctcgaacgcttggaagttcccggtttcgaggcagacgacgtattagcgactctcgcaaagaaagccgaacgtgagggctatgaagtccagatcttgacagcagatcgcgatcttttccagcttttatctccgcgcatctcggtgttacacccggaagggcatcgtatcaccccggaatggctctgggagaaatatggtttgcgtcccgaacaatgggtggattttcgcgccttagcaggcgatccgagcgacaatattccgggagttaaaggtatcggcgagaagacggcgctcaagctccttaaagaatgggggtcgttggagaacttgcttaagaatttagatcaggtcaaaccagagtcagtgcgtgagaagattcttgctcacctcgaagacctcaaattaagccgcgaattgtcccgtgtacgcaccgatttgccgctcgaagttgatttcggtcgccgccgcgaacctgactgggagggtcttaaagcgtttttagagcgtcttgaatttggttcgctcttgcatgaattcggccttttagaaagcccgttactggccgaagaagcaccttggccaccgcccgagggcgcgtttttaggttaccgtttgagtcgcccggaaccgatgtgggccgaattactggctcttgcagcgtctgcccagggacgtgtgtatcgcgcggaagaccctcatggtgcgctccgcggcctcttcgaagtccgtggactccttgccaaagacttagctgttgttgcattgcgcgaaggtcttgatttacctccgactgatgatccaatgcttcttgcgtacctcttggacccgtcaaacacgacgcccgaaggcgtagcccgtcgttacggcggcgagtggaccgaagatgcagcgaaacgcgcgttattggccgaacgtttgcacgaaaatttattaggacgtttgcaaggcgaggaacgtctcctctggctttacgaagaagtggagaaaccattgagtcgcgtgctcgcgcatatggaagctaccggtgtcaaattagacgtggcgtatttggagaatctcagccttgaagttgctgcccacatgcgccgcttggaggaagaagtattccgtttagcaggccgttcctttcgccttaactctcgcgatcagttagaacgtgtgttgttcgatgaacttggtctccctcctatcggcaagacagagaagaccggtaaacgtagcacttcagcggcggttttagaagctcttcgcgaagtccatcccattgtggacaagatcttgcagtaccgcgaaatggcgaaattgaaaggcacctatattgaccgtcttccggcattagtccacccgaaaacgggacgcctccatacccgcttcaaccaaacagccacggcgaccggtcgtttgtcctcctctgatccaaaccttcagaatattccagtacgtaccccattgggccagaagatccgccgtgcgtttgtagctgaggagggttggcgtttagtggccctcgattatcgtcaaattgaattacgtgtccttgcccatctttctggcgatgagaacctcatccgcgtgtttcaggaaggcaaagacattcacactcaaacggcaagctggatgtttggattatcagctgaagcgatcgatcctttgatgcgtcgtgcagcgaagaccatcaatttcggtgttctctacggtatgagtgcctttcgtttgtcgcaggaattaggcattccctatgaagaagctcaggggttcattcagaaatactttcaaagctatcccaaagttaaagcatggatcgagaagactctccgtgaaggccgcacacgtggttacgtagagaccttatttggacgtcgccgctatgttcccgatttaaacgctcgcgtgaaaggcaagcgtgaagccgccgaacgcatggcgttcaacatgcctgtacagggcacggcaactgacctcatgaaacttgcaatggtgcgcctttttccacaattgcgtgaagttggtgcccgcatgctcttgcaggtccacgatgaactcttgttagaagcgccaaaagagcgtgcggaagaggtggcagccctcgcgaaagaagttatggaaggcgtgtggcccttagcggtgcctcttgaagtcgaagttggtattggcgaggattggctggctgccaaagga

SEQ ID NO: 6480 - protein, 841 aa, synthetic construct
  REGION 1..841: note = Variant of DNA polymerase I from Thermus sp. strain 2.9
MHHHHHHGGSGVLPVFEPKGRVLLVDGHHLAYRNFFALKGLTTSLGEPVQGVYGFAKSLLKALKEDGDVVIVVFDAKAPSFRHEAYEAYKAGRAPTPEDFPRQLALMKELVDLLGLERLEVPGFEADDVLATLAKKAEREGYEVQILTADRDLFQLLSPRISVLHPEGHRITPEWLWEKYGLRPEQWVDFRALAGDPSDNIPGVKGIGEKTALKLLKEWGSLENLLKNLDQVKPESVREKILAHLEDLKLSRELSRVRTDLPLEVDFGRRREPDWEGLKAFLERLEFGSLLHEFGLLESPLLAEEAPWPPPEGAFLGYRLSRPEPMWAELLALAASAQGRVYRAEDPHGALRGLFEVRGLLAKDLAVVALREGLDLPPTDDPMLLAYLLDPSNTTPEGVARRYGGEWTEDAAKRALLAERLHENLLGRLQGEERLLWLYEEVEKPLSRVLAHMEATGVKLDVAYLENLSLEVAAHMRRLEEEVFRLAGRSFRLNSRDQLERVLFDELGLPPIGKTEKTGKRSTSAAVLEALREVHPIVDKILQYREMAKLKGTYIDRLPALVHPKTGRLHTRFNQTATATGRLSSSDPNLQNIPVRTPLGQKIRRAFVAEEGWRLVALDYRQIELRVLAHLSGDENLIRVFQEGKDIHTQTASWMFGLSAEAIDPLMRRAAKTINFGVLYGMSAFRLSQELGIPYEEAQGFIQKYFQSYPKVKAWIEKTLREGRTRGYVETLFGRRRYVPDLNARVKGKREAAERMAFNMPVQGTATDLMKLAMVRLFPQLREVGARMLLQVHDELLLEAPKERAEEVAALAKEVMEGVWPLAVPLEVEVGIGEDWLAAKG

SEQ ID NO: 6481 - DNA, 2523 bp, synthetic construct
  misc_feature 1..2523: note = Variant of DNA polymerase I from Thermus sp. strain 2.9
  source 1..2523: mol_type = other DNA
atgcaccatcatcatcatcatggcggtagcggcgtgttaccggtgttcgagcctaaaggtcgcgtgcttctggttgatggccatcatctcgcgtatcgtaacttctttgccctgaaaggattaaccaccagcctgggcgagccggtacagggtgtctacggctttgcaaagtcgctcctgaaagctctgaaagaagacggtgatgtggtgattgttgtctttgatgcgaaagcgccaagttttcgccacgaagcgtacgaagcttacaaagccgggcgtgctccaacgccggaagactttcctcgccaattggcgcttatgaaggaattagtggatttgcttggcctcgaacgcttggaagttcccggtttcgaggcagacgacgtattagcgactctcgcaaagaaagccgaacgtgagggctatgaagtccagatcttgacagcagatcgcgatcttttccagcttttatctccgcgcatctcggtgttacacccggaagggcatcgtatcaccccggaatggctctgggagaaatatggtttgcgtcccgaacaatgggtggattttcgcgccttagcaggcgatccgagcgacaatattccgggagttaaaggtatcggcgagaagacggcgctcaagctccttaaagaatgggggtcgttggagaacttgcttaagaatttagatcaggtcaaaccagagtcagtgcgtgagaagattcttgctcacctcgaagacctcaaattaagccgcgaattgtcccgtgtacgcaccgatttgccgctcgaagttgatttcggtcgccgccgcgaacctgactgggagggtcttaaagcgtttttagagcgtcttgaatttggttcgctcttgcatgaattcggccttttagaaagcccgttactggccgaagaagcaccttggccaccgcccgagggcgcgtttttaggttaccgtttgagtcgcccggaaccgatgtgggccgaattactggctcttgcagcgtctgcccagggacgtgtgtatcgcgcggaagaccctcatggtgcgctccgcggcctcttcgaagtccgtggactccttgccaaagacttagctgttgttgcattgcgcgaaggtcttgatttacctccgactgatgatccaatgcttcttgcgtacctcttggacccgtcaaacacgacgcccgaaggcgtagcccgtcgttacggcggcgagtggaccgaagatgcagcgaaacgcgcgttattggccgaacgtttgcacgaaaatttattaggacgtttgcaaggcgaggaacgtctcctctggctttacgaagaagtggagaaaccattgagtcgcgtgctcgcgcatatggaagctaccggtgtcaaattagacgtggcgtatttggagtggcttcaccttgaagttgctgcccacatgcgccgcttggaggaagaagtattccgtttagcaggccgttcctttcgccttaactctcgcgatcagttagaacgtgtgttgttcgatgaacttggtctccctcctatcggcaagacagagaagaccggtaaacgtagcacttcagcggcggttttagaagctcttcgcgaagtccatcccattgtggacaagatcttgcagtaccgcgaaatggcgaaattgaaaggcacctatattgaccgtcttccggcattagtccacccgaaaacgggacgcctccatacccgcttcaaccaaacagccacggcgaccggtcgtttgtcctcctctgatccaaaccttcagaatattccagtacgtaccccattgggccagaagatccgccgtgcgtttgtagctgaggagggttggcgtttagtggccctcgattatcgtcaaattgaattacgtgtccttgcccatctttctggcgatgagaacctcatccgcgtgtttcaggaaggcaaagacattcacactcaaacggcaagctggatgtttggattatcagctgaagcgatcgatcctttgatgcgtcgtgcagcgaagaccatcaatttcggtgttctctacggtatgagtgcctttcgtttgtcgcaggaattaggcattccctatgaagaagctcaggcgttcattcagaaatactttcaaagctatcccaaagttaaagcatggatcgagaagactctccgtgaaggccgcacacgtggttacgtagagaccttatttggacgtcgccgctatgttcccgatttaaacgctcgcgtgaaaggcaagcgtgaagccgccgaacgcatggcgttcaacatgcctgtacagggcacggcagctgacctcatgaaacttgcaatggtgcgcctttttccacaattgcgtgaagttggtgcccgcatgctcttgcaggtccacgatgaactcttgttagaagcgccaaaagagcgtgcggaagaggtggcagccctcgcgaaagaagttatggaaggcgtgtggcccttagcggtgcctcttgaagtcgaagttggtattggcgaggattggctggctgccaaagga

SEQ ID NO: 6482 - protein, 841 aa, synthetic construct
  REGION 1..841: note = Variant of DNA polymerase I from Thermus sp. strain 2.9
MHHHHHHGGSGVLPVFEPKGRVLLVDGHHLAYRNFFALKGLTTSLGEPVQGVYGFAKSLLKALKEDGDVVIVVFDAKAPSFRHEAYEAYKAGRAPTPEDFPRQLALMKELVDLLGLERLEVPGFEADDVLATLAKKAEREGYEVQILTADRDLFQLLSPRISVLHPEGHRITPEWLWEKYGLRPEQWVDFRALAGDPSDNIPGVKGIGEKTALKLLKEWGSLENLLKNLDQVKPESVREKILAHLEDLKLSRELSRVRTDLPLEVDFGRRREPDWEGLKAFLERLEFGSLLHEFGLLESPLLAEEAPWPPPEGAFLGYRLSRPEPMWAELLALAASAQGRVYRAEDPHGALRGLFEVRGLLAKDLAVVALREGLDLPPTDDPMLLAYLLDPSNTTPEGVARRYGGEWTEDAAKRALLAERLHENLLGRLQGEERLLWLYEEVEKPLSRVLAHMEATGVKLDVAYLEWLHLEVAAHMRRLEEEVFRLAGRSFRLNSRDQLERVLFDELGLPPIGKTEKTGKRSTSAAVLEALREVHPIVDKILQYREMAKLKGTYIDRLPALVHPKTGRLHTRFNQTATATGRLSSSDPNLQNIPVRTPLGQKIRRAFVAEEGWRLVALDYRQIELRVLAHLSGDENLIRVFQEGKDIHTQTASWMFGLSAEAIDPLMRRAAKTINFGVLYGMSAFRLSQELGIPYEEAQAFIQKYFQSYPKVKAWIEKTLREGRTRGYVETLFGRRRYVPDLNARVKGKREAAERMAFNMPVQGTAADLMKLAMVRLFPQLREVGARMLLQVHDELLLEAPKERAEEVAALAKEVMEGVWPLAVPLEVEVGIGEDWLAAKG

SEQ ID NO: 6483 - DNA, 2523 bp, synthetic construct
  misc_feature 1..2523: note = Variant of DNA polymerase I from Thermus sp. strain 2.9
  source 1..2523: mol_type = other DNA
atgcaccatcatcatcatcatggcggtagcggcgtgttaccggtgttcgagcctaaaggtcgcgtgcttctggttgatggccatcatctcgcgtatcgtaacttctttgccctgaaaggattaaccaccagcctgggcgagccggtacagggtgtctacggctttgcaaagtcgctcctgaaagctctgaaagaagacggtgatgtggtgattgttgtctttgatgcgaaagcgccaagttttcgccacgaagcgtacgaagcttacaaagccgggcgtgctccaacgccggaagactttcctcgccaattggcgcttatgaaggaattagtggatttgcttggcctcgaacgcttggaagttcccggtttcgaggcagacgacgtattagcgactctcgcaaagaaagccgaacgtgagggctatgaagtccagatcttgacagcagatcgcgatcttttccagcttttatctccgcgcatctcggtgttacacccggaagggcatcgtatcaccccggaatggctctgggagaaatatggtttgcgtcccgaacaatgggtggattttcgcgccttagcaggcgatccgagcgacaatattccgggagttaaaggtatcggcgagaagacggcgctcaagctccttaaagaatgggggtcgttggagaacttgcttaagaatttagatcaggtcaaaccagagtcagtgcgtgagaagattcttgctcacctcgaagacctcaaattaagccgcgaattgtcccgtgtacgcaccgatttgccgctcgaagttgatttcggtcgccgccgcgaacctgactgggagggtcttaaagcgtttttagagcgtcttgaatttggttcgctcttgcatgaattcggccttttagaaagcccgttactggccgaagaagcaccttggccaccgcccgagggcgcgtttttaggttaccgtttgagtcgcccggaaccgatgtgggccgaattactggctcttgcagcgtctgcccagggacgtgtgtatcgcgcggaagaccctcatggtgcgctccgcggcctcttcgaagtccgtggactccttgccaaagacttagctgttgttgcattgcgcgaaggtcttgatttacctccgactgatgatccaatgcttcttgcgtacctcttggacccgtcaaacacgacgcccgaaggcgtagcccgtcgttacggcggcgagtggaccgaagatgcagcgaaacgcgcgttattggccgaacgtttgcacgaaaatttattaggacgtttgcaaggcgaggaacgtctcctctggctttacgaagaagtggagaaaccattgagtcgcgtgctcgcgcatatggaagctaccggtgtcaaattagacgtggcgtatttggagaatctcagccttgaagttgctgcccacatgcgccgcttggaggaagaagtattccgtttagcaggccgttcctttcgccttaactctcgcgatcagttagaacgtgtgttgttcgatgaacttggtctccctcctatcggcaagacagagaagaccggtaaacgtagcacttcagcggcggttttagaagctcttcgcgaagtccatcccattgtggacaagatcttgcagtaccgcgaaatggcgaaattgaaaggcacctatattgaccgtcttccggcattagtccacccgaaaacgggacgcctccatacccgcttcaaccaaacagccacggcgaccggtcgtttgtcctcctctgatccaaaccttcagaatattccagtacgtaccccattgggccagaagatccgccgtgcgtttgtagctgaggagggttggcgtttagtggccctcgattatcgtcaaattgaattacgtgtccttgcccatctttctggcgatgagaacctcatccgcgtgtttcaggaaggcaaagacattcacactcaaacggcaagctggatgtttggattatcagctgaagcgatcgatcctttgatgcgtcgtgcagcgaagaccatcaatttcggtgttctctacggtatgagtgcctttcgtttgtcgcaggaattaggcattccctatgaagaagctcaggcgttcattcagaaatactttcaaagctatcccaaagttaaagcatggatcgagaagactctccgtgaaggccgcacacgtggttacgtagagaccttatttggacgtcgccgctatgttcccgatttaaactttcgcgtgaaaggcaagcgtgaagccgccgaacgcatggcgttcaacatgcctgtacagggcacggcagctgacctcatgaaacttgcaatggtgcgcctttttccacaattgcgtgaagttggtgcccgcatgctcttgcaggtccacgatgaactcttgttagaagcgccaaaagagcgtgcggaagaggtggcagccctcgcgaaagaagttatggaaggcgtgtggcccttagcggtgcctcttgaagtcgaagttggtattggcgaggattggctggctgccaaagga

SEQ ID NO: 6484 - protein, 841 aa, synthetic construct
  REGION 1..841: note = Variant of DNA polymerase I from Thermus sp. strain 2.9
MHHHHHHGGSGVLPVFEPKGRVLLVDGHHLAYRNFFALKGLTTSLGEPVQGVYGFAKSLLKALKEDGDVVIVVFDAKAPSFRHEAYEAYKAGRAPTPEDFPRQLALMKELVDLLGLERLEVPGFEADDVLATLAKKAEREGYEVQILTADRDLFQLLSPRISVLHPEGHRITPEWLWEKYGLRPEQWVDFRALAGDPSDNIPGVKGIGEKTALKLLKEWGSLENLLKNLDQVKPESVREKILAHLEDLKLSRELSRVRTDLPLEVDFGRRREPDWEGLKAFLERLEFGSLLHEFGLLESPLLAEEAPWPPPEGAFLGYRLSRPEPMWAELLALAASAQGRVYRAEDPHGALRGLFEVRGLLAKDLAVVALREGLDLPPTDDPMLLAYLLDPSNTTPEGVARRYGGEWTEDAAKRALLAERLHENLLGRLQGEERLLWLYEEVEKPLSRVLAHMEATGVKLDVAYLENLSLEVAAHMRRLEEEVFRLAGRSFRLNSRDQLERVLFDELGLPPIGKTEKTGKRSTSAAVLEALREVHPIVDKILQYREMAKLKGTYIDRLPALVHPKTGRLHTRFNQTATATGRLSSSDPNLQNIPVRTPLGQKIRRAFVAEEGWRLVALDYRQIELRVLAHLSGDENLIRVFQEGKDIHTQTASWMFGLSAEAIDPLMRRAAKTINFGVLYGMSAFRLSQELGIPYEEAQAFIQKYFQSYPKVKAWIEKTLREGRTRGYVETLFGRRRYVPDLNFRVKGKREAAERMAFNMPVQGTAADLMKLAMVRLFPQLREVGARMLLQVHDELLLEAPKERAEEVAALAKEVMEGVWPLAVPLEVEVGIGEDWLAAKG

SEQ ID NO: 6485 - DNA, 2523 bp, synthetic construct
  misc_feature 1..2523: note = Variant of DNA polymerase I from Thermus sp. strain 2.9
  source 1..2523: mol_type = other DNA
atgcaccatcatcatcatcatggcggtagcggcgtgttaccggtgttcgagcctaaaggtcgcgtgcttctggttgatggccatcatctcgcgtatcgtaacttctttgccctgaaaggattaaccaccagcctgggcgagccggtacagggtgtctacggctttgcaaagtcgctcctgaaagctctgaaagaagacggtgatgtggtgattgttgtctttgatgcgaaagcgccaagttttcgccacgaagcgtacgaagcttacaaagccgggcgtgctccaacgccggaagactttcctcgccaattggcgcttatgaaggaattagtggatttgcttggcctcgaacgcttggaagttcccggtttcgaggcagacgacgtattagcgactctcgcaaagaaagccgaacgtgagggctatgaagtccagatcttgacagcagatcgcgatcttttccagcttttatctccgcgcatctcggtgttacacccggaagggcatcgtatcaccccggaatggctctgggagaaatatggtttgcgtcccgaacaatgggtggattttcgcgccttagcaggcgatccgagcgacaatattccgggagttaaaggtatcggcgagaagacggcgctcaagctccttaaagaatgggggtcgttggagaacttgcttaagaatttagatcaggtcaaaccagagtcagtgcgtgagaagattcttgctcacctcgaagacctcaaattaagccgcgaattgtcccgtgtacgcaccgatttgccgctcgaagttgatttcggtcgccgccgcgaacctgactgggagggtcttaaagcgtttttagagcgtcttgaatttggttcgctcttgcatgaattcggccttttagaaagcccgttactggccgaagaagcaccttggccaccgcccgagggcgcgtttttaggttaccgtttgagtcgcccggaaccgatgtgggccgaattactggctcttgcagcgtctgcccagggacgtgtgtatcgcgcggaagaccctcatggtgcgctccgcggcctcttcgaagtccgtggactccttgccaaagacttagctgttgttgcattgcgcgaaggtcttgatttacctccgactgatgatccaatgcttcttgcgtacctcttggacccgtcaaacacgacgcccgaaggcgtagcccgtcgttacggcggcgagtggaccgaagatgcagcgaaacgcgcgttattggccgaacgtttgcacgaaaatttattaggacgtttgcaaggcgaggaacgtctcctctggctttacgaagaagtggagaaaccattgagtcgcgtgctcgcgcatatggaagctaccggtgtcaaattagacgtggcgtatttggagaatctcagccttgaagttgctgcccacatgcgccgcttggaggaagaagtattccgtttagcaggccgttcctttcgccttaactctcgcgatcagttagaacgtgtgttgttcgatgaacttggtctccctcctatcggcaagacagagagtaccggtaaacgtagcacttcagcggcggttttagaagctcttcgcgaagtccatcccattgtggacaagatcttgcagtaccgcgaaatggcgaaattgaaaggcacctatattgaccgtcttccggcattagtccacccgaaaacgggacgcctccatacccgcttcaaccaaacagccacggcgaccggtcgtttgtcctcctctgatccaaaccttcagaatattccagtacgtaccccattgggccagaagatccgccgtgcgtttgtagctgaggagggttggcgtttagtggccctcgattatcgtcaaattgaattacgtgtccttgcccatctttctggcgatgagaacctcatccgcgtgtttcaggaaggcaaagacattcacactcaaacggcaagctggatgtttggattatcagctgaagcgatcgatcctttgatgcgtcgtgcagcgaagaccatcaatttcggtgttctctacggtatgagtgcctttcgtttgtcgcaggaattaggcattccctatgaagaagctcaggcgttcattcagaaatactttcaaagctatcccaaagttaaagcatggatcgagaagactctccgtgaaggccgcacacgtggttacgtagagaccttatttggacgtcgccgctatgttcccgatttaaacgctcgcgtgaaaggcaagcgtgaagccgccgaacgcatggcgttcaacatgcctgtacagggcacggcagctgacctcatgaaacttgcaatggtgcgcctttttccacaattgcgtgaagttggtgcccgcatgctcttgcaggtccacgatgaactcttgttagaagcgccaaaagagcgtgcggaagaggtggcagccctcgcgaaagaagttatggaaggcgtgtggcccttagcggtgcctcttgaagtcgaagttggtattggcgaggattggctggctgccaaagga

SEQ ID NO: 6486 - protein, 841 aa, synthetic construct
  REGION 1..841: note = Variant of DNA polymerase I from Thermus sp. strain 2.9
MHHHHHHGGSGVLPVFEPKGRVLLVDGHHLAYRNFFALKGLTTSLGEPVQGVYGFAKSLLKALKEDGDVVIVVFDAKAPSFRHEAYEAYKAGRAPTPEDFPRQLALMKELVDLLGLERLEVPGFEADDVLATLAKKAEREGYEVQILTADRDLFQLLSPRISVLHPEGHRITPEWLWEKYGLRPEQWVDFRALAGDPSDNIPGVKGIGEKTALKLLKEWGSLENLLKNLDQVKPESVREKILAHLEDLKLSRELSRVRTDLPLEVDFGRRREPDWEGLKAFLERLEFGSLLHEFGLLESPLLAEEAPWPPPEGAFLGYRLSRPEPMWAELLALAASAQGRVYRAEDPHGALRGLFEVRGLLAKDLAVVALREGLDLPPTDDPMLLAYLLDPSNTTPEGVARRYGGEWTEDAAKRALLAERLHENLLGRLQGEERLLWLYEEVEKPLSRVLAHMEATGVKLDVAYLENLSLEVAAHMRRLEEEVFRLAGRSFRLNSRDQLERVLFDELGLPPIGKTESTGKRSTSAAVLEALREVHPIVDKILQYREMAKLKGTYIDRLPALVHPKTGRLHTRFNQTATATGRLSSSDPNLQNIPVRTPLGQKIRRAFVAEEGWRLVALDYRQIELRVLAHLSGDENLIRVFQEGKDIHTQTASWMFGLSAEAIDPLMRRAAKTINFGVLYGMSAFRLSQELGIPYEEAQAFIQKYFQSYPKVKAWIEKTLREGRTRGYVETLFGRRRYVPDLNARVKGKREAAERMAFNMPVQGTAADLMKLAMVRLFPQLREVGARMLLQVHDELLLEAPKERAEEVAALAKEVMEGVWPLAVPLEVEVGIGEDWLAAKG

SEQ ID NO: 6487 - DNA, 2523 bp, synthetic construct
  misc_feature 1..2523: note = Variant of DNA polymerase I from Thermus sp. strain 2.9
  source 1..2523: mol_type = other DNA
atgcaccatcatcatcatcatggcggtagcggcgtgttaccggtgttcgagcctaaaggtcgcgtgcttctggttgatggccatcatctcgcgtatcgtaacttctttgccctgaaaggattaaccaccagcctgggcgagccggtacagggtgtctacggctttgcaaagtcgctcctgaaagctctgaaagaagacggtgatgtggtgattgttgtctttgatgcgaaagcgccaagttttcgccacgaagcgtacgaagcttacaaagccgggcgtgctccaacgccggaagactttcctcgccaattggcgcttatgaaggaattagtggatttgcttggcctcgaacgcttggaagttcccggtttcgaggcagacgacgtattagcgactctcgcaaagaaagccgaacgtgagggctatgaagtccagatcttgacagcagatcgcgatcttttccagcttttatctccgcgcatctcggtgttacacccggaagggcatcgtatcaccccggaatggctctgggagaaatatggtttgcgtcccgaacaatgggtggattttcgcgccttagcaggcgatccgagcgacaatattccgggagttaaaggtatcggcgagaagacggcgctcaagctccttaaagaatgggggtcgttggagaacttgcttaagaatttagatcaggtcaaaccagagtcagtgcgtgagaagattcttgctcacctcgaagacctcaaattaagccgcgaattgtcccgtgtacgcaccgatttgccgctcgaagttgatttcggtcgccgccgcgaacctgactgggagggtcttaaagcgtttttagagcgtcttgaatttggttcgctcttgcatgaattcggccttttagaaagcccgttactggccgaagaagcaccttggccaccgcccgagggcgcgtttttaggttaccgtttgagtcgcccggaaccgatgtgggccgaattactggctcttgcagcgtctgcccagggacgtgtgtatcgcgcggaagaccctcatggtgcgctccgcggcctcttcgaagtccgtggactccttgccaaagacttagctgttgttgcattgcgcgaaggtcttgatttacctccgactgatgatccaatgcttcttgcgtacctcttggacccgtcaaacacgacgcccgaaggcgtagcccgtcgttacggcggcgagtggaccgaagatgcagcgaaacgcgcgttattggccgaacgtttgcacgaaaatttattaggacgtttgcaaggcgaggaacgtctcctctggctttacgaagaagtggagaaaccattgagtcgcgtgctcgcgcatatggaagctaccggtgtcaaattagacgtggcgtatttggagaatctcagccttgaagttgctgcccacatgcgccgcttggaggaagaagtattccgtttagcaggccgttcctttcgccttaactctcgcgatcagttagaacgtgtgttgttcgatgaacttggtctccctcctatcggcaagacagagaagaccggtaaacgtagcacttcagcggcggttttagaagctcttcgcgaagtccatcccattgtggacaagatcttgcagtaccgcgaaatggcgaaattgaaaggcacctatattgaccgtcttccggcattagtccacccgaaaacgggacgcctccatacccgcttcaaccaaacagccacggcgaccggtcgtttgtcctcctctgatccaaaccttcagaatattccagtacgtaccccattgggccagaagatccgccgtgcgtttgtagctgaggagggttggcgtttagtggccctcgattatcgtcaaattgaattacgtgtccttgcccatctttctggcgatgagaacctcatccgcgtgtttcaggaaggcaaagacattcacactcaaacggcaagctggatgtttggattatcagctgaagcgatcgatcctttgatgcgtcgtgcagcgaagaccatcaatttcggtgttctctacggtatgagtgcctttcgtttgtcgcaggaattaggcattccctatgaagaagctcaggcgttcattcagaaatactttcaaagctatcccaaagttaaagcatggatcgagaagactctccgtgaaggccgcacacgtggttacgtagagaccttatttggacgtcgccgctatgttcccgatttaaacgctcgcgtgaaaggcaagcgtgaagccgccgaacgcatggcgttcaacatgcctgtacagggcacggcagctgacctcatgaaacttgcaatggtgcgcctttttccacaattgcgtgaagttggtgcccgcatggttttgcaggtccacgatgaactcttgttagaagcgccaaaagagcgtgcggaagaggtggcagccctcgcgaaagaagttatggaaggcgtgtggcccttagcggtgcctcttgaagtcgaagttggtattggcgaggattggctggctgccaaagga

SEQ ID NO: 6488 - protein, 841 aa, synthetic construct
  REGION 1..841: note = Variant of DNA polymerase I from Thermus sp. strain 2.9
MHHHHHHGGSGVLPVFEPKGRVLLVDGHHLAYRNFFALKGLTTSLGEPVQGVYGFAKSLLKALKEDGDVVIVVFDAKAPSFRHEAYEAYKAGRAPTPEDFPRQLALMKELVDLLGLERLEVPGFEADDVLATLAKKAEREGYEVQILTADRDLFQLLSPRISVLHPEGHRITPEWLWEKYGLRPEQWVDFRALAGDPSDNIPGVKGIGEKTALKLLKEWGSLENLLKNLDQVKPESVREKILAHLEDLKLSRELSRVRTDLPLEVDFGRRREPDWEGLKAFLERLEFGSLLHEFGLLESPLLAEEAPWPPPEGAFLGYRLSRPEPMWAELLALAASAQGRVYRAEDPHGALRGLFEVRGLLAKDLAVVALREGLDLPPTDDPMLLAYLLDPSNTTPEGVARRYGGEWTEDAAKRALLAERLHENLLGRLQGEERLLWLYEEVEKPLSRVLAHMEATGVKLDVAYLENLSLEVAAHMRRLEEEVFRLAGRSFRLNSRDQLERVLFDELGLPPIGKTEKTGKRSTSAAVLEALREVHPIVDKILQYREMAKLKGTYIDRLPALVHPKTGRLHTRFNQTATATGRLSSSDPNLQNIPVRTPLGQKIRRAFVAEEGWRLVALDYRQIELRVLAHLSGDENLIRVFQEGKDIHTQTASWMFGLSAEAIDPLMRRAAKTINFGVLYGMSAFRLSQELGIPYEEAQAFIQKYFQSYPKVKAWIEKTLREGRTRGYVETLFGRRRYVPDLNARVKGKREAAERMAFNMPVQGTAADLMKLAMVRLFPQLREVGARMVLQVHDELLLEAPKERAEEVAALAKEVMEGVWPLAVPLEVEVGIGEDWLAAKG

SEQ ID NO: 6489 - DNA, 2523 bp, synthetic construct
  misc_feature 1..2523: note = Variant of DNA polymerase I from Thermus sp. strain 2.9
  source 1..2523: mol_type = other DNA
atgcaccatcatcatcatcatggcggtagcggcgtgttaccggtgttcgagcctaaaggtcgcgtgcttctggttgatggccatcatctcgcgtatcgtaacttctttgccctgaaaggattaaccaccagcctgggcgagccggtacagggtgtctacggctttgcaaagtcgctcctgaaagctctgaaagaagacggtgatgtggtgattgttgtctttgatgcgaaagcgccaagttttcgccacgaagcgtacgaagcttacaaagccgggcgtgctccaacgccggaagactttcctcgccaattggcgcttatgaaggaattagtggatttgcttggcctcgaacgcttggaagttcccggtttcgaggcagacgacgtattagcgactctcgcaaagaaagccgaacgtgagggctatgaagtccagatcttgacagcagatcgcgatcttttccagcttttatctccgcgcatctcggtgttacacccggaagggcatcgtatcaccccggaatggctctgggagaaatatggtttgcgtcccgaacaatgggtggattttcgcgccttagcaggcgatccgagcgacaatattccgggagttaaaggtatcggcgagaagacggcgctcaagctccttaaagaatgggggtcgttggagaacttgcttaagaatttagatcaggtcaaaccagagtcagtgcgtgagaagattcttgctcacctcgaagacctcaaattaagccgcgaattgtcccgtgtacgcaccgatttgccgctcgaagttgatttcggtcgccgccgcgaacctgactgggagggtcttaaagcgtttttagagcgtcttgaatttggttcgctcttgcatgaattcggccttttagaaagcccgttactggccgaagaagcaccttggccaccgcccgagggcgcgtttttaggttaccgtttgagtcgcccggaaccgatgtgggccgaattactggctcttgcagcgtctgcccagggacgtgtgtatcgcgcggaagaccctcatggtgcgctccgcggcctcttcgaagtccgtggactccttgccaaagacttagctgttgttgcattgcgcgaaggtcttgatttacctccgactgatgatccaatgcttcttgcgtacctcttggacccgtcaaacacgacgcccgaaggcgtagcccgtcgttacggcggcgagtggaccgaagatgcagcgaaacgcgcgttattggccgaacgtttgcacgaaaatttattaggacgtttgcaaggcgaggaacgtctcctctggctttacgaagaagtggagaaaccattgagtcgcgtgctcgcgcatatggaagctaccggtgtcaaattagacgtggcgtatttggagaatctcagccttgaagttgctgcccacatgcgccgcttggaggaagaagtattccgtttagcaggccgttcctttcgccttaactctcgcgatcagttagaacgtgtgttgttcgatgaacttggtctccctcctatcggcaagacagagaagaccggtaaacgtagcacttcagcggcggttttagaagctcttcgcgaagtccatcccattgtggacaagatcttgcagtaccgcgaaatggcgaaattgaaaggcacctatattgaccgtcttccggcattagtccacccgaaaacgggacgcctccatacccgcttcaaccaaacagccacggcgaccggtcgtttgtcctcctctgatccaaaccttcagaatattccagtacgtaccccattgggccagaagatccgccgtgcgtttgtagctgaggagggttggcctttagtggccctcgattatcgtcaaattgaattacgtgtccttgcccatctttctggcgatgagaacctcatccgcgtgtttcaggaaggcaaagacattcacactcaaacggcaagctggatgtttggattatcagctgaagcgatcgatcctttgatgcgtcgtgcagcgaagaccatcaatttcggtgttctctacggtatgagtgcctttcgtttgtcgcaggaattaggcattccctatgaagaagctcaggcgttcattcagaaatactttcaaagctatcccaaagttaaagcatggatcgagaagactctccgtgaaggccgcacacgtggttacgtagagaccttatttggacgtcgccgctatgttcccgatttaaacgctcgcgtgaaaggcaagcgtgaagccgccgaacgcatggcgttcaacatgcctgtacagggcacggcagctgacctcatgaaacttgcaatggtgcgcctttttccacaattgcgtgaagttggtgcccgcatgctcttgcaggtccacgatgaactcttgttagaagcgccaaaagagcgtgcggaagaggtggcagccctcgcgaaagaagttatggaaggcgtgtggcccttagcggtgcctcttgaagtcgaagttggtattggcgaggattggctggctgccaaagga

SEQ ID NO: 6490 - protein, 841 aa, synthetic construct
  REGION 1..841: note = Variant of DNA polymerase I from Thermus sp. strain 2.9
MHHHHHHGGSGVLPVFEPKGRVLLVDGHHLAYRNFFALKGLTTSLGEPVQGVYGFAKSLLKALKEDGDVVIVVFDAKAPSFRHEAYEAYKAGRAPTPEDFPRQLALMKELVDLLGLERLEVPGFEADDVLATLAKKAEREGYEVQILTADRDLFQLLSPRISVLHPEGHRITPEWLWEKYGLRPEQWVDFRALAGDPSDNIPGVKGIGEKTALKLLKEWGSLENLLKNLDQVKPESVREKILAHLEDLKLSRELSRVRTDLPLEVDFGRRREPDWEGLKAFLERLEFGSLLHEFGLLESPLLAEEAPWPPPEGAFLGYRLSRPEPMWAELLALAASAQGRVYRAEDPHGALRGLFEVRGLLAKDLAVVALREGLDLPPTDDPMLLAYLLDPSNTTPEGVARRYGGEWTEDAAKRALLAERLHENLLGRLQGEERLLWLYEEVEKPLSRVLAHMEATGVKLDVAYLENLSLEVAAHMRRLEEEVFRLAGRSFRLNSRDQLERVLFDELGLPPIGKTEKTGKRSTSAAVLEALREVHPIVDKILQYREMAKLKGTYIDRLPALVHPKTGRLHTRFNQTATATGRLSSSDPNLQNIPVRTPLGQKIRRAFVAEEGWPLVALDYRQIELRVLAHLSGDENLIRVFQEGKDIHTQTASWMFGLSAEAIDPLMRRAAKTINFGVLYGMSAFRLSQELGIPYEEAQAFIQKYFQSYPKVKAWIEKTLREGRTRGYVETLFGRRRYVPDLNARVKGKREAAERMAFNMPVQGTAADLMKLAMVRLFPQLREVGARMLLQVHDELLLEAPKERAEEVAALAKEVMEGVWPLAVPLEVEVGIGEDWLAAKG

SEQ ID NO: 6491 - DNA, 2523 bp, synthetic construct
  misc_feature 1..2523: note = Variant of DNA polymerase I from Thermus sp. strain 2.9
  source 1..2523: mol_type = other DNA
atgcaccatcatcatcatcatggcggtagcggcgtgttaccggtgttcgagcctaaaggtcgcgtgcttctggttgatggccatcatctcgcgtatcgtaacttctttgccctgaaaggattaaccaccagcctgggcgagccggtacagggtgtctacggctttgcaaagtcgctcctgaaagctctgaaagaagacggtgatgtggtgattgttgtctttgatgcgaaagcgccaagttttcgccacgaagcgtacgaagcttacaaagccgggcgtgctccaacgccggaagactttcctcgccaattggcgcttatgaaggaattagtggatttgcttggcctcgaacgcttggaagttcccggtttcgaggcagacgacgtattagcgactctcgcaaagaaagccgaacgtgagggctatgaagtccagatcttgacagcagatcgcgatcttttccagcttttatctccgcgcatctcggtgttacacccggaagggcatcgtatcaccccggaatggctctgggagaaatatggtttgcgtcccgaacaatgggtggattttcgcgccttagcaggcgatccgagcgacaatattccgggagttaaaggtatcggcgagaagacggcgctcaagctccttaaagaatgggggtcgttggagaacttgcttaagaatttagatcaggtcaaaccagagtcagtgcgtgagaagattcttgctcacctcgaagacctcaaattaagccgcgaattgtcccgtgtacgcaccgatttgccgctcgaagttgatttcggtcgccgccgcgaacctgactgggagggtcttaaagcgtttttagagcgtcttgaatttggttcgctcttgcatgaattcggccttttagaaagcccgttactggccgaagaagcaccttggccaccgcccgagggcgcgtttttaggttaccgtttgagtcgcccggaaccgatgtgggccgaattactggctcttgcagcgtctgcccagggacgtgtgtatcgcgcggaagaccctcatggtgcgctccgcggcctcttcgaagtccgtggactccttgccaaagacttagctgttgttgcattgcgcgaaggtcttgatttacctccgactgatgatccaatgcttcttgcgtacctcttggacccgtcaaacacgacgcccgaaggcgtagcccgtcgttacggcggcgagtggaccgaagatgcagcgaaacgcgcgttattggccgaacgtttgcacgaaaatttattaggacgtttgcaaggcgaggaacgtctcctctggctttacgaagaagtggagaaaccattgagtcgcgtgctcgcgcatatggaagctaccggtgtcaaattagacgtggcgtatttggagaatctcagccttgaagttgctgcccacatgcgccgcttggaggaagaagtattccgtttagcaggccgttcctttcgccttaactctcgcgatcagttagaacgtgtgttgttcgatgaacttggtctccctcctatcggcaagacagagaagaccggtaaacgtagcacttcagcggcggttttagaagctcttcgcgaagtccatcccattgtggacaagatcttgcagtaccgcgaaatggcgaaattgaaaggcacctatattgaccgtcttccggcattagtccacccgaaaacgggacgcctccatacccgcttcaaccaaacagccacggcgaccggtcgtttgtcctcctctgatccaaaccttcagaatattccagtacgtaccccattgggccagaagatccgccgtgcgtttgtagctgaggagggttggcgtttagtggccctcgattatcgtcaaattgaattacgtgtccttgcccatctttctggcgatgagaacctcatccgcgtgtttcaggaaggcaaagacattcacactcaaacggcaagctggatgtttggattatcagctgaagcgatcgatcctttgatgcgtcgtgcagcgaagaccatcaatttcggtgttctctacggtatgagtgcctttcgtttgtcgcaggaaacgggcattccctatgaagaagctcaggcgttcattcagaaatactttcaaagctatcccaaagttaaagcatggatcgagaagactctccgtgaaggccgcacacgtggttacgtagagaccttatttggacgtcgccgctatgttcccgatttaaacgctcgcgtgaaaggcaagcgtgaagccgccgaacgcatggcgttcaacatgcctgtacagggcacggcagctgacctcatgaaacttgcaatggtgcgcctttttccacaattgcgtgaagttggtgcccgcatgctcttgcaggtccacgatgaactcttgttagaagcgccaaaagagcgtgcggaagaggtggcagccctcgcgaaagaagttatggaaggcgtgtggcccttagcggtgcctcttgaagtcgaagttggtattggcgaggattggctggctgccaaagga

SEQ ID NO: 6492 - protein, 841 aa, synthetic construct
  REGION 1..841: note = Variant of DNA polymerase I from Thermus sp. strain 2.9
MHHHHHHGGSGVLPVFEPKGRVLLVDGHHLAYRNFFALKGLTTSLGEPVQGVYGFAKSLLKALKEDGDVVIVVFDAKAPSFRHEAYEAYKAGRAPTPEDFPRQLALMKELVDLLGLERLEVPGFEADDVLATLAKKAEREGYEVQILTADRDLFQLLSPRISVLHPEGHRITPEWLWEKYGLRPEQWVDFRALAGDPSDNIPGVKGIGEKTALKLLKEWGSLENLLKNLDQVKPESVREKILAHLEDLKLSRELSRVRTDLPLEVDFGRRREPDWEGLKAFLERLEFGSLLHEFGLLESPLLAEEAPWPPPEGAFLGYRLSRPEPMWAELLALAASAQGRVYRAEDPHGALRGLFEVRGLLAKDLAVVALREGLDLPPTDDPMLLAYLLDPSNTTPEGVARRYGGEWTEDAAKRALLAERLHENLLGRLQGEERLLWLYEEVEKPLSRVLAHMEATGVKLDVAYLENLSLEVAAHMRRLEEEVFRLAGRSFRLNSRDQLERVLFDELGLPPIGKTEKTGKRSTSAAVLEALREVHPIVDKILQYREMAKLKGTYIDRLPALVHPKTGRLHTRFNQTATATGRLSSSDPNLQNIPVRTPLGQKIRRAFVAEEGWRLVALDYRQIELRVLAHLSGDENLIRVFQEGKDIHTQTASWMFGLSAEAIDPLMRRAAKTINFGVLYGMSAFRLSQETGIPYEEAQAFIQKYFQSYPKVKAWIEKTLREGRTRGYVETLFGRRRYVPDLNARVKGKREAAERMAFNMPVQGTAADLMKLAMVRLFPQLREVGARMLLQVHDELLLEAPKERAEEVAALAKEVMEGVWPLAVPLEVEVGIGEDWLAAKG

SEQ ID NO: 6493 - DNA, 2523 bp, synthetic construct
  misc_feature 1..2523: note = Variant of DNA polymerase I from Thermus sp. strain 2.9
  source 1..2523: mol_type = other DNA
atgcaccatcatcatcatcatggcggtagcggcgtgttaccggtgttcgagcctaaaggtcgcgtgcttctggttgatggccatcatctcgcgtatcgtaacttctttgccctgaaaggattaaccaccagcctgggcgagccggtacagggtgtctacggctttgcaaagtcgctcctgaaagctctgaaagaagacggtgatgtggtgattgttgtctttgatgcgaaagcgccaagttttcgccacgaagcgtacgaagcttacaaagccgggcgtgctccaacgccggaagactttcctcgccaattggcgcttatgaaggaattagtggatttgcttggcctcgaacgcttggaagttcccggtttcgaggcagacgacgtattagcgactctcgcaaagaaagccgaacgtgagggctatgaagtccagatcttgacagcagatcgcgatcttttccagcttttatctccgcgcatctcggtgttacacccggaagggcatcgtatcaccccggaatggctctgggagaaatatggtttgcgtcccgaacaatgggtggattttcgcgccttagcaggcgatccgagcgacaatattccgggagttaaaggtatcggcgagaagacggcgctcaagctccttaaagaatgggggtcgttggagaacttgcttaagaatttagatcaggtcaaaccagagtcagtgcgtgagaagattcttgctcacctcgaagacctcaaattaagccgcgaattgtcccgtgtacgcaccgatttgccgctcgaagttgatttcggtcgccgccgcgaacctgactgggagggtcttaaagcgtttttagagcgtcttgaatttggttcgctcttgcatgaattcggccttttagaaagcccgttactggccgaagaagcaccttggccaccgcccgagggcgcgtttttaggttaccgtttgagtcgcccggaaccgatgtgggccgaattactggctcttgcagcgtctgcccagggacgtgtgtatcgcgcggaagaccctcatggtgcgctccgcggcctcttcgaagtccgtggactccttgccaaagacttagctgttgttgcattgcgcgaaggtcttgatttacctccgactgatgatccaatgcttcttgcgtacctcttggacccgtcaaacacgacgcccgaaggcgtagcccgtcgttacggcggcgagtggaccgaagatgcagcgaaacgcgcgttattggccgaacgtttgcacgaaaatttattaggacgtttgcaaggcgaggaacgtctcctctggctttacgaagaagtggagaaaccattgagtcgcgtgctcgcgcatatggaagctaccggtgtcaaattagacgtggcgtatttggagaatctcagccttgaagttgctgcccacatgcgccgcttggaggaagaagtattccgtttagcaggccgttcctttcgccttaactctcgcgatcagttagaacgtgtgttgttcgatgaacttggtctccctcctatcggcaagacagagaagaccggttcgcgtagcacttcagcggcggttttagaagctcttcgcgaagtccatcccattgtggacaagatcttgcagtaccgcgaaatggcgaaattgaaaggcacctatattgaccgtcttccggcattagtccacccgaaaacgggacgcctccatacccgcttcaaccaaacagccacggcgaccggtcgtttgtcctcctctgatccaaaccttcagaatattccagtacgtaccccattgggccagaagatccgccgtgcgtttgtagctgaggagggttggcgtttagtggccctcgattatcgtcaaattgaattacgtgtccttgcccatctttctggcgatgagaacctcatccgcgtgtttcaggaaggcaaagacattcacactcaaacggcaagctggatgtttggattatcagctgaagcgatcgatcctttgatgcgtcgtgcagcgaagaccatcaatttcggtgttctctacggtatgagtgcctttcgtttgtcgcaggaattaggcattccctatgaagaagctcaggcgttcattcagaaatactttcaaagctatcccaaagttaaagcatggatcgagaagactctccgtgaaggccgcacacgtggttacgtagagaccttatttggacgtcgccgctatgttcccgatttaaacgctcgcgtgaaaggcaagcgtgaagccgccgaacgcatggcgttcaacatgcctgtacagggcacggcagctgacctcatgaaacttgcaatggtgcgcctttttccacaattgcgtgaagttggtgcccgcatgctcttgcaggtccacgatgaactcttgttagaagcgccaaaagagcgtgcggaagaggtggcagccctcgcgaaagaagttatggaaggcgtgtggcccttagcggtgcctcttgaagtcgaagttggtattggcgaggattggctggctgccaaagga

SEQ ID NO: 6494 - protein, 841 aa, synthetic construct
  REGION 1..841: note = Variant of DNA polymerase I from Thermus sp. strain 2.9
MHHHHHHGGSGVLPVFEPKGRVLLVDGHHLAYRNFFALKGLTTSLGEPVQGVYGFAKSLLKALKEDGDVVIVVFDAKAPSFRHEAYEAYKAGRAPTPEDFPRQLALMKELVDLLGLERLEVPGFEADDVLATLAKKAEREGYEVQILTADRDLFQLLSPRISVLHPEGHRITPEWLWEKYGLRPEQWVDFRALAGDPSDNIPGVKGIGEKTALKLLKEWGSLENLLKNLDQVKPESVREKILAHLEDLKLSRELSRVRTDLPLEVDFGRRREPDWEGLKAFLERLEFGSLLHEFGLLESPLLAEEAPWPPPEGAFLGYRLSRPEPMWAELLALAASAQGRVYRAEDPHGALRGLFEVRGLLAKDLAVVALREGLDLPPTDDPMLLAYLLDPSNTTPEGVARRYGGEWTEDAAKRALLAERLHENLLGRLQGEERLLWLYEEVEKPLSRVLAHMEATGVKLDVAYLENLSLEVAAHMRRLEEEVFRLAGRSFRLNSRDQLERVLFDELGLPPIGKTEKTGSRSTSAAVLEALREVHPIVDKILQYREMAKLKGTYIDRLPALVHPKTGRLHTRFNQTATATGRLSSSDPNLQNIPVRTPLGQKIRRAFVAEEGWRLVALDYRQIELRVLAHLSGDENLIRVFQEGKDIHTQTASWMFGLSAEAIDPLMRRAAKTINFGVLYGMSAFRLSQELGIPYEEAQAFIQKYFQSYPKVKAWIEKTLREGRTRGYVETLFGRRRYVPDLNARVKGKREAAERMAFNMPVQGTAADLMKLAMVRLFPQLREVGARMLLQVHDELLLEAPKERAEEVAALAKEVMEGVWPLAVPLEVEVGIGEDWLAAKG

SEQ ID NO: 6495 - DNA, 2523 bp, synthetic construct
  misc_feature 1..2523: note = Variant of DNA polymerase I from Thermus sp. strain 2.9
  source 1..2523: mol_type = other DNA
atgcaccatcatcatcatcatggcggtagcggcgtgttaccggtgttcgagcctaaaggtcgcgtgcttctggttgatggccatcatctcgcgtatcgtaacttctttgccctgaaaggattaaccaccagcctgggcgagccggtacagggtgtctacggctttgcaaagtcgctcctgaaagctctgaaagaagacggtgatgtggtgattgttgtctttgatgcgaaagcgccaagttttcgccacgaagcgtacgaagcttacaaagccgggcgtgctccaacgccggaagactttcctcgccaattggcgcttatgaaggaattagtggatttgcttggcctcgaacgcttggaagttcccggtttcgaggcagacgacgtattagcgactctcgcaaagaaagccgaacgtgagggctatgaagtccagatcttgacagcagatcgcgatcttttccagcttttatctccgcgcatctcggtgttacacccggaagggcatcgtatcaccccggaatggctctgggagaaatatggtttgcgtcccgaacaatgggtggattttcgcgccttagcaggcgatccgagcgacaatattccgggagttaaaggtatcggcgagaagacggcgctcaagctccttaaagaatgggggtcgttggagaacttgcttaagaatttagatcaggtcaaaccagagtcagtgcgtgagaagattcttgctcacctcgaagacctcaaattaagccgcgaattgtcccgtgtacgcaccgatttgccgctcgaagttgatttcggtcgccgccgcgaacctgactgggagggtcttaaagcgtttttagagcgtcttgaatttggttcgctcttgcatgaattcggccttttagaaagcccgttactggccgaagaagcaccttggccaccgcccgagggcgcgtttttaggttaccgtttgagtcgcccggaaccgatgtgggccgaattactggctcttgcagcgtctgcccagggacgtgtgtatcgcgcggaagaccctcatggtgcgctccgcggcctcttcgaagtccgtggactccttgccaaagacttagctgttgttgcattgcgcgaaggtcttgatttacctccgactgatgatccaatgcttcttgcgtacctcttggacccgtcaaacacgacgcccgaaggcgtagcccgtcgttacggcggcgagtggaccgaagatgcagcgaaacgcgcgttattggccgaacgtttgcacgaaaatttattaggacgtttgcaaggcgaggaacgtctcctctggctttacgaagaagtgacgaaaccattgagtcgcgtgctcgcgcatatggaagctaccggtgtcaaattagacgtggcgtatttggagaatctcagccttgaagttgctgcccacatgcgccgcttggaggaagaagtattccgtttagcaggccgttcctttcgccttaactctcgcgatcagttagaacgtgtgttgttcgatgaacttggtctccctcctatcggcaagacagagaagaccggtaaacgtagcacttcagcggcggttttagaagctcttcgcgaagtccatcccattgtggacaagatcttgcagtaccgcgaaatggcgaaattgaaaggcacctatattgaccgtcttccggcattagtccacccgaaaacgggacgcctccatacccgcttcaaccaaacagccacggcgaccggtcgtttgtcctcctctgatccaaaccttcagaatattccagtacgtaccccattgggccagaagatccgccgtgcgtttgtagctgaggagggttggcgtttagtggccctcgattatcgtcaaattgaattacgtgtccttgcccatctttctggcgatgagaacctcatccgcgtgtttcaggaaggcaaagacattcacactcaaacggcaagctggatgtttggattatcagctgaagcgatcgatcctttgatgcgtcgtgcagcgaagaccatcaatttcggtgttctctacggtatgagtgcctttcgtttgtcgcaggaattaggcattccctatgaagaagctcaggcgttcattcagaaatactttcaaagctatcccaaagttaaagcatggatcgagaagactctccgtgaaggccgcacacgtggttacgtagagaccttatttggacgtcgccgctatgttcccgatttaaacgctcgcgtgaaaggcaagcgtgaagccgccgaacgcatggcgttcaacatgcctgtacagggcacggcagctgacctcatgaaacttgcaatggtgcgcctttttccacaattgcgtgaagttggtgcccgcatgctcttgcaggtccacgatgaactcttgttagaagcgccaaaagagcgtgcggaagaggtggcagccctcgcgaaagaagttatggaaggcgtgtggcccttagcggtgcctcttgaagtcgaagttggtattggcgaggattggctggctgccaaagga

SEQ ID NO: 6496 - protein, 841 aa, synthetic construct
  REGION 1..841: note = Variant of DNA polymerase I from Thermus sp. strain 2.9
MHHHHHHGGSGVLPVFEPKGRVLLVDGHHLAYRNFFALKGLTTSLGEPVQGVYGFAKSLLKALKEDGDVVIVVFDAKAPSFRHEAYEAYKAGRAPTPEDFPRQLALMKELVDLLGLERLEVPGFEADDVLATLAKKAEREGYEVQILTADRDLFQLLSPRISVLHPEGHRITPEWLWEKYGLRPEQWVDFRALAGDPSDNIPGVKGIGEKTALKLLKEWGSLENLLKNLDQVKPESVREKILAHLEDLKLSRELSRVRTDLPLEVDFGRRREPDWEGLKAFLERLEFGSLLHEFGLLESPLLAEEAPWPPPEGAFLGYRLSRPEPMWAELLALAASAQGRVYRAEDPHGALRGLFEVRGLLAKDLAVVALREGLDLPPTDDPMLLAYLLDPSNTTPEGVARRYGGEWTEDAAKRALLAERLHENLLGRLQGEERLLWLYEEVTKPLSRVLAHMEATGVKLDVAYLENLSLEVAAHMRRLEEEVFRLAGRSFRLNSRDQLERVLFDELGLPPIGKTEKTGKRSTSAAVLEALREVHPIVDKILQYREMAKLKGTYIDRLPALVHPKTGRLHTRFNQTATATGRLSSSDPNLQNIPVRTPLGQKIRRAFVAEEGWRLVALDYRQIELRVLAHLSGDENLIRVFQEGKDIHTQTASWMFGLSAEAIDPLMRRAAKTINFGVLYGMSAFRLSQELGIPYEEAQAFIQKYFQSYPKVKAWIEKTLREGRTRGYVETLFGRRRYVPDLNARVKGKREAAERMAFNMPVQGTAADLMKLAMVRLFPQLREVGARMLLQVHDELLLEAPKERAEEVAALAKEVMEGVWPLAVPLEVEVGIGEDWLAAKG

SEQ ID NO: 6497 - DNA, 2523 bp, synthetic construct
  misc_feature 1..2523: note = Variant of DNA polymerase I from Thermus sp. strain 2.9
  source 1..2523: mol_type = other DNA
atgcaccatcatcatcatcatggcggtagcggcgtgttaccggtgttcgagcctaaaggtcgcgtgcttctggttgatggccatcatctcgcgtatcgtaacttctttgccctgaaaggattaaccaccagccgcggcgagccggtacagggtgtctacggctttgcaaagtcgctcctgaaagctctgaaagaagacggtgatgtggtgattgttgtctttgatgcgaaagcgccaagttttcgccacgaagcgtacgaagcttacaaagccgggcgtgctccaacgccggaagactttcctcgccaattggcgcttatgaaggaattagtggatttgcttggcctcgaacgcttggaagttcccggtttcgaggcagacgacgtattagcgactctcgcaaagaaagccgaacgtgagggctatgaagtccagatcttgacagcagatcgcgatcttttccagcttttatctccgcgcatctcggtgttacacccggaagggcatcgtatcaccccggaatggctctgggagaaatatggtttgcgtcccgaacaatgggtggattttcgcgccttagcaggcgatccgagcgacaatattccgggagttaaaggtatcggcgagaagacggcgctcaagctccttaaagaatgggggtcgttggagaacttgcttaagaatttagatcaggtcaaaccagagtcagtgcgtgagaagattcttgctcacctcgaagacctcaaattaagccgcgaattgtcccgtgtacgcaccgatttgccgctcgaagttgatttcggtcgccgccgcgaacctgactgggagggtcttaaagcgtttttagagcgtcttgaatttggttcgctcttgcatgaattcggccttttagaaagcccgttaccggccgaagaagcaccttggccaccgcccgagggcgcgtttttaggttaccgtttgagtcgcccggaaccgatgtgggccgaattactggctcttgcagcgtctgcccagggacgtgtgtatcgcgcggaagaccctcatggtgcgctccgcggcctcttcgaagtccgtggactccttgccaaagacttagctgttgttgcattgcgcgaaggtcttgatttacctccgactgatgatccaatgcttcttgcgtacctcttggacccgtcaaacacgacgcccgaaggcgtagcccgtcgttacggcggcgagtggaccgaagatgcagcgaaacgcgcgttattggccgaacgtttgcacgaaaatttattaggacgtttgcaaggcgaggaacgtctcctctggctttacgaagaagtggagaaaccattgagtcgcgtgctcgcgcatatggaagctaccggtgtcaaattagacgtggcgtatttggagaatcttcaccttgaagttgctgcccacatgcgccgcttggaggaagaagtattccgtttagcaggccgctcctttcgccttaactctcgcgatcagttagaacgtgtgttgttcgatgaacttggtctccctcctatcggcaagacagagaagaccggtaaacgtagcacttcagcggcggttttagaagctcttcgcgaagtccatcccattgtggacaagatcttgcagtaccgcgaactggcgaaattgaaaggcacctatattgaccgtcttccggcattagtccacccgaaaacgggacgcctccatacccgcttcaaccaaacagccacggcgaccggtcgtttgtcctcctctgatccaaaccttcagaatattccagtacgtaccccattgggccagaagatccgccgtgcgtttgtagctgaggagggttggcgtttagtggccctcgattatcgtcaaattgaattacgtgtccttgcccatctttctggcgatgagaacctcatccgcgtgtttcaggaaggcaaagacattcacactcaaacggcaagctggatgtttggattatcagctgaagcgatcgatcctttgatgcgtcgtgcagcgaagaccatcaatttcggtgttctctacggtatgagtgcctttcgtttgtcgcaggaattaggcattccctatgaagaagctcaggcgttcattcagaaatactttcaaagctatcccaaagttaaagcatggatcgagaagactctcgaggaaggccgcacacgtggttacgtagagaccttatttggacgtcgccgctatgttcccgatttaaacgctcgcgtgaaaggcaagcgtgaagccgccgaacgcatggcgttcaacatgcctgtacagggcacggcagctgacctcatgaaacttgcaatggtgcgcctttttccacaattgcgtgaagttggtgcccgcatgctcttgcaggtccacgatgaactcttgttagaagcgccaaaagagcgtgcggaagaggtggcagccctcgcgaaagaagttatggaaggcgtgtggcccttagcggtgcctcttgaagtcgaagttggtattggcgaggattggctggctgccaaagga

SEQ ID NO: 6498 - protein, 841 aa, synthetic construct
  REGION 1..841: note = Variant of DNA polymerase I from Thermus sp. strain 2.9
MHHHHHHGGSGVLPVFEPKGRVLLVDGHHLAYRNFFALKGLTTSRGEPVQGVYGFAKSLLKALKEDGDVVIVVFDAKAPSFRHEAYEAYKAGRAPTPEDFPRQLALMKELVDLLGLERLEVPGFEADDVLATLAKKAEREGYEVQILTADRDLFQLLSPRISVLHPEGHRITPEWLWEKYGLRPEQWVDFRALAGDPSDNIPGVKGIGEKTALKLLKEWGSLENLLKNLDQVKPESVREKILAHLEDLKLSRELSRVRTDLPLEVDFGRRREPDWEGLKAFLERLEFGSLLHEFGLLESPLPAEEAPWPPPEGAFLGYRLSRPEPMWAELLALAASAQGRVYRAEDPHGALRGLFEVRGLLAKDLAVVALREGLDLPPTDDPMLLAYLLDPSNTTPEGVARRYGGEWTEDAAKRALLAERLHENLLGRLQGEERLLWLYEEVEKPLSRVLAHMEATGVKLDVAYLENLHLEVAAHMRRLEEEVFRLAGRSFRLNSRDQLERVLFDELGLPPIGKTEKTGKRSTSAAVLEALREVHPIVDKILQYRELAKLKGTYIDRLPALVHPKTGRLHTRFNQTATATGRLSSSDPNLQNIPVRTPLGQKIRRAFVAEEGWRLVALDYRQIELRVLAHLSGDENLIRVFQEGKDIHTQTASWMFGLSAEAIDPLMRRAAKTINFGVLYGMSAFRLSQELGIPYEEAQAFIQKYFQSYPKVKAWIEKTLEEGRTRGYVETLFGRRRYVPDLNARVKGKREAAERMAFNMPVQGTAADLMKLAMVRLFPQLREVGARMLLQVHDELLLEAPKERAEEVAALAKEVMEGVWPLAVPLEVEVGIGEDWLAAKG

SEQ ID NO: 6499 - DNA, 2523 bp, synthetic construct
  misc_feature 1..2523: note = Variant of DNA polymerase I from Thermus sp. strain 2.9
  source 1..2523: mol_type = other DNA
atgcaccatcatcatcatcatggcggtagcggcgtgttaccggtgttcgagcctaaaggtcgcgtgcttctggttgatggccatcatctcgcgtatcgtaacttctttgccctgaaaggattaaccaccagcctgggcgagccggtacagggtgtctacggctttgcaaagtcgctcctgaaagctctgaaagaagacggtgatgtggtgattgttgtctttgatgcgaaagcgccaagttttcgccacgaagcgtacgaagcttacaaagccgggcgtgctccaacgccggaagactttcctcgccaattggcgcttatgaaggaattagtggatttgcttggcctcgaacgcttggaagttcccggtttcgaggcagacgacgtattagcgactctcgcaaagaaagccgaacgtgagggctatgaagtccagatcttgacagcagatcgcgatcttttccagcttttatctccgcgcatctcggtgttacacccggaagggcatcgtatcaccccggaatggctctgggagaaatatggtttgcgtcccgaacaatgggtggattttcgcgccttagcaggcgatccgagcgacaatattccgggagttaaaggtatcggcgagaagacggcgctcaagctccttaaagaatgggggtcgttggagaacttgcttaagaatttagatcaggtcaaaccagagtcagtgcgtgagaagattcttgctcacctcgaagacctcaaattaagccgcgaattgtcccgtgtacgcaccgatttgccgctcgaagttgatttcggtcgccgccgcgaacctgactgggagggtcttaaagcgtttttagagcgtcttgaatttggttcgctcttgcatgaattcggccttttagaaagcccgttactggccgaagaagcaccttggccaccgcccgagggcgcgtttttaggttaccgtttgagtcgcccggaaccgatgtgggccgaattactggctcttgcagcgtctgcccagggacgtgtgtatcgcgcggaagaccctcatggtgcgctccgcggcctcttcgaagtccgtggactccttgccaaagacttagctgttgttgcattgcgcgaaggtcttgatttacctccgactgatgatccaatgcttcttgcgtacctcttggacccgtcaaacacgacgcccgttggcgtagcccgtcgttacggcggcgagtggaccgaagatgcagcgaaacgcgcgttattggccgaacgtttgcacgaaaatttattaggacgtttgcaaggcgaggaacgtctcctctggctttacgaagaagtggagaaaccattgagtcgcgtgctcgcgcatatggaagctaccggtgtcaaattagacgtggcgtatttggagaatctcagccttgaagttgctgcccacatgcgccgcttggaggaagaagtattccgtttagcaggccgttcctttcgccttaactctcgcgatcagttagaacgtgtgttgttcgatgaacttggtctccctcctatcggcaagacagagaagaccggtaaacgtagcacttcagcggcggttttagaagctcttcgcgaagtccatcccattgtggacaagatcttgcagtaccgcgaaatggcgaaattgaaaggcacctatattgaccgtcttccggcattagtccacccgaaaacgggacgcctccatacccgcttcaaccaaacagccacggcgaccggtcgtttgtcctcctctgatccaaaccttcagaatattccagtacgtaccccattgggccagaagatccgccgtgcgtttgtagctgaggagggttggcgtttagtggccctcgattatcgtcaaattgaattacgtgtccttgcccatctttctggcgatgagaacctcatccgcgtgtttcaggaaggcaaagacattcacactcaaacggcaagctggatgtttggattatcagctgaagcgatcgatcctttgatgcgtcgtgcagcgaagaccatcaatttcggtgttctctacggtatgagtgcctttcgtttgtcgcaggaattaggcattccctatgaagaagctcaggcgttcattcagaaatactttcaaagctatcccaaagttaaagcatggatcgagaagactctccgtgaaggccgcacacgtggttacgtagagaccttatttggacgtcgccgctatgttcccgatttaaacgctcgcgtgaaaggcaagcgtgaagccgccgaacgcatggcgttcaacatgcctgtacagggcacggcagctgacctcatgaaacttgcaatggtgcgcctttttccacaattgcgtgaagttggtgcccgcatgctcttgcaggtccacgatgaactcttgttagaagcgccaaaagagcgtgcggaagaggtggcagccctcgcgaaagaagttatggaaggcgtgtggcccttagcggtgcctcttgaagtcgaagttggtattggcgaggattggctggctgccaaagga

SEQ ID NO: 6500 - protein, 841 aa, synthetic construct
  REGION 1..841: note = Variant of DNA polymerase I from Thermus sp. strain 2.9
MHHHHHHGGSGVLPVFEPKGRVLLVDGHHLAYRNFFALKGLTTSLGEPVQGVYGFAKSLLKALKEDGDVVIVVFDAKAPSFRHEAYEAYKAGRAPTPEDFPRQLALMKELVDLLGLERLEVPGFEADDVLATLAKKAEREGYEVQILTADRDLFQLLSPRISVLHPEGHRITPEWLWEKYGLRPEQWVDFRALAGDPSDNIPGVKGIGEKTALKLLKEWGSLENLLKNLDQVKPESVREKILAHLEDLKLSRELSRVRTDLPLEVDFGRRREPDWEGLKAFLERLEFGSLLHEFGLLESPLLAEEAPWPPPEGAFLGYRLSRPEPMWAELLALAASAQGRVYRAEDPHGALRGLFEVRGLLAKDLAVVALREGLDLPPTDDPMLLAYLLDPSNTTPVGVARRYGGEWTEDAAKRALLAERLHENLLGRLQGEERLLWLYEEVEKPLSRVLAHMEATGVKLDVAYLENLSLEVAAHMRRLEEEVFRLAGRSFRLNSRDQLERVLFDELGLPPIGKTEKTGKRSTSAAVLEALREVHPIVDKILQYREMAKLKGTYIDRLPALVHPKTGRLHTRFNQTATATGRLSSSDPNLQNIPVRTPLGQKIRRAFVAEEGWRLVALDYRQIELRVLAHLSGDENLIRVFQEGKDIHTQTASWMFGLSAEAIDPLMRRAAKTINFGVLYGMSAFRLSQELGIPYEEAQAFIQKYFQSYPKVKAWIEKTLREGRTRGYVETLFGRRRYVPDLNARVKGKREAAERMAFNMPVQGTAADLMKLAMVRLFPQLREVGARMLLQVHDELLLEAPKERAEEVAALAKEVMEGVWPLAVPLEVEVGIGEDWLAAKG

SEQ ID NO: 6501 - DNA, 2523 bp, synthetic construct
  misc_feature 1..2523: note = Variant of DNA polymerase I from Thermus sp. strain 2.9
  source 1..2523: mol_type = other DNA
atgcaccatcatcatcatcatggcggtagcggcgtgttaccggtgttcgagcctaaaggtcgcgtgcttctggttgatggccatcatctcgcgtatcgtaacttctttgccctgaaaggattaaccaccagcctgggcgagccggtacagggtgtctacggctttgcaaagtcgctcctgaaagctctgaaagaagacggtgatgtggtgattgttgtctttgatgcgaaagcgccaagttttcgccacgaagcgtacgaagcttacaaagccgggcgtgctccaacgccggaagactttcctcgccaattggcgcttatgaaggaattagtggatttgcttggcctcgaacgcttggaagttcccggtttcgaggcagacgacgtattagcgactctcgcaaagaaagccgaacgtgagggctatgaagtccagatcttgacagcagatcgcgatcttttccagcttttatctccgcgcatctcggtgttacacccggaagggcatcgtatcaccccggaatggctctgggagaaatatggtttgcgtcccgaacaatgggtggattttcgcgccttagcaggcgatccgagcgacaatattccgggagttaaaggtatcggcgagaagacggcgctcaagctccttaaagaatgggggtcgttggagaacttgcttaagaatttagatcaggtcaaaccagagtcagtgcgtgagaagattcttgctcacctcgaagacctcaaattaagccgcgaattgtcccgtgtacgcaccgatttgccgctcgaagttgatttcggtcgccgccgcgaacctgactgggagggtcttaaagcgtttttagagcgtcttgaatttggttcgctcttgcatgaattcggccttttagaaagcccgttactggccgaagaagcaccttggccaccgcccgagggcgcgtttttaggttaccgtttgagtcgcccggaaccgatgtgggccgaattactggctcttgcagcgtctgcccagggacgtgtgtatcgcgcggaagaccctcatggtgcgctccgcggcctcttcgaagtccgtggactccttgccaaagacttagctgttgttgcattgcgcgaaggtcttgatttacctccgactgatgatccaatgcttcttgcgtacctcttggacccgtcaaacacgacgcccgaaggcgtagcccgtcgttacggcggcgagtggaccgaagatgcagcgaaacgcgcgttattggccgaacgtttgcacgaaaatttattaggacgtttgcaaggcgaggaacgtctcctctggctttacgaagaagtggagaaaccattgagtcgcgtgctcgcgcatatggaagctaccggtgtcaaattagacgtggcgtatttggagaatctcagccttgaagttgctgcccacatgcgccgcttggaggaagaagtattccgtttagcaggccgttcctttcgccttaactctcgcgatcagttagaacgtgtgttgttcgatgaacttggtctccctcctatcggcaagacagagaagaccggtaaacgtagcacttcagcggcggttttagaagctcttcgcgaagtccatcccattgtggacaagatcttgcagtaccgcgaaatggcgaaattgaaaggcacctatattgaccgtcttccggcattagtccacccgaaaacgggacgcctccatacccgcttcaaccaaacagccacggcgaccggtcgtttgtcctcctcttggccaaaccttcagaatattccagtacgtaccccattgggccagaagatccgccgtgcgtttgtagctgaggagggttggcgtttagtggccctcgattatcgtcaaattgaattacgtgtccttgcccatctttctggcgatgagaacctcatccgcgtgtttcaggaaggcaaagacattcacactcaaacggcaagctggatgtttggattatcagctgaagcgatcgatcctttgatgcgtcgtgcagcgaagaccatcaatttcggtgttctctacggtatgagtgcctttcgtttgtcgcaggaattaggcattccctatgaagaagctcaggcgttcattcagaaatactttcaaagctatcccaaagttaaagcatggatcgagaagactctccgtgaaggccgcacacgtggttacgtagagaccttatttggacgtcgccgctatgttcccgatttaaacgctcgcgtgaaaggcaagcgtgaagccgccgaacgcatggcgttcaacatgcctgtacagggcacggcagctgacctcatgaaacttgcaatggtgcgcctttttccacaattgcgtgaagttggtgcccgcatgctcttgcaggtccacgatgaactcttgttagaagcgccaaaagagcgtgcggaagaggtggcagccctcgcgaaagaagttatggaaggcgtgtggcccttagcggtgcctcttgaagtcgaagttggtattggcgaggattggctggctgccaaagga

SEQ ID NO: 6502 - protein, 841 aa, synthetic construct
  REGION 1..841: note = Variant of DNA polymerase I from Thermus sp. strain 2.9
MHHHHHHGGSGVLPVFEPKGRVLLVDGHHLAYRNFFALKGLTTSLGEPVQGVYGFAKSLLKALKEDGDVVIVVFDAKAPSFRHEAYEAYKAGRAPTPEDFPRQLALMKELVDLLGLERLEVPGFEADDVLATLAKKAEREGYEVQILTADRDLFQLLSPRISVLHPEGHRITPEWLWEKYGLRPEQWVDFRALAGDPSDNIPGVKGIGEKTALKLLKEWGSLENLLKNLDQVKPESVREKILAHLEDLKLSRELSRVRTDLPLEVDFGRRREPDWEGLKAFLERLEFGSLLHEFGLLESPLLAEEAPWPPPEGAFLGYRLSRPEPMWAELLALAASAQGRVYRAEDPHGALRGLFEVRGLLAKDLAVVALREGLDLPPTDDPMLLAYLLDPSNTTPEGVARRYGGEWTEDAAKRALLAERLHENLLGRLQGEERLLWLYEEVEKPLSRVLAHMEATGVKLDVAYLENLSLEVAAHMRRLEEEVFRLAGRSFRLNSRDQLERVLFDELGLPPIGKTEKTGKRSTSAAVLEALREVHPIVDKILQYREMAKLKGTYIDRLPALVHPKTGRLHTRFNQTATATGRLSSSWPNLQNIPVRTPLGQKIRRAFVAEEGWRLVALDYRQIELRVLAHLSGDENLIRVFQEGKDIHTQTASWMFGLSAEAIDPLMRRAAKTINFGVLYGMSAFRLSQELGIPYEEAQAFIQKYFQSYPKVKAWIEKTLREGRTRGYVETLFGRRRYVPDLNARVKGKREAAERMAFNMPVQGTAADLMKLAMVRLFPQLREVGARMLLQVHDELLLEAPKERAEEVAALAKEVMEGVWPLAVPLEVEVGIGEDWLAAKG

SEQ ID NO: 6503 - DNA, 2523 bp, synthetic construct
  misc_feature 1..2523: note = Variant of DNA polymerase I from Thermus sp. strain 2.9
  source 1..2523: mol_type = other DNA
atgcaccatcatcatcatcatggcggtagcggcgtgttaccggtgttcgagcctaaaggtcgcgtgcttctggttgatggccatcatctcgcgtatcgtaacttctttgccctgaaaggattaaccaccagcctgggcgagccggtacagggtgtctacggctttgcaaagtcgctcctgaaagctctgaaagaagacggtgatgtggtgattgttgtctttgatgcgaaagcgccaagttttcgccacgaagcgtacgaagcttacaaagccgggcgtgctccaacgccggaagactttcctcgccaattggcgcttatgaaggaattagtggatttgcttggcctcgaacgcttggaagttcccggtttcgaggcagacgacgtattagcgactctcgcaaagaaagccgaacgtgagggctatgaagtccagatcttgacagcagatcgcgatcttttccagcttttatctccgcgcatctcggtgttacacccggaagggcatcgtatcaccccggaatggctctgggagaaatatggtttgcgtcccgaacaatgggtggattttcgcgccttagcaggcgatccgagcgacaatattccgggagttaaaggtatcggcgagaagacggcgctcaagctccttaaagaatgggggtcgttggagaacttgcttaagaatttagatcaggtcaaaccagagtcagtgcgtgagaagattcttgctcacctcgaagacctcaaattaagccgcgaattgtcccgtgtacgcaccgatttgccgctcgaagttgatttcggtcgccgccgcgaacctgactgggagggtcttaaagcgtttttagagcgtcttgaatttggttcgctcttgcatgaattcggccttttagaaagcccgttactggccgaagaagcaccttggccaccgcccgagggcgcgtttttaggttaccgtttgagtcgcccggaaccgatgtgggccgaattactggctcttgcagcgtctgcccagggacgtgtgtatcgcgcggaagaccctcatggtgcgctccgcggcctcttcgaagtccgtggactccttgccaaagacttagctgttgttgcattgcgcgaaggtcttgatttacctccgactgatgatccaatgcttcttgcgtacctcttggacccgtcaaacacgacgcccgaaggcgtagcccgtcgttacggcggcgagtggaccgaagatgcagcgaaacgcgcgttattggccgaacgtttgcacgaaaatttattaggacgtttgcaaggcgaggaacgtctcctctggctttacgaagaagtggagaaaccattgagtcgcgtgctcgcgcatatggaagctaccggtgtcaaattagacgtggcgtatttggagaatctcagccttgaagttgctgcccacatgcgccgcttggaggaagaagtattccgtttagcaggccgttcctttcgccttaactctcgcgatcagttagaacgtgtgttgttcgatgaacttggtctccctcctatcggcaagacagagaagaccggtaaacgtagcacttcagcggcggttttagaagctcttcgcgaagtccatcccattgtggacaagatcttgcagtaccgcgaaatggcgaaattgaaaggcacctatattgaccgtcttccggcattagtccacccgaaaacgggacgcctccatacccgcttcaaccaaacagccacggcgaccggtcgtttgtcctcctctgatccaaaccttcagaatattccagtacgtaccccattgggccagaagatccgccgtgcgtttgtagctgaggagggttggcgtttagtggccctcgattatcgtcaaattgaattacgtgtccttgcccatctttctggcgatgagaacctcatccgcgtgtttcaggaaggcaaagacattcacactcaaacggcaagctggatgtttggattatcagctgaagcgatcgatcctttgatgcgtcgtgcagcgaagaccatcaatttcggtgttctctacggtatgagtgcctttcgtttgtcgcaggaattaggcattccctatgaagaagctcaggcgttcattcagaaatactttcaaagctatcccaaagttaaagcatggatcgagaagactctccgtgaaggccgcacacgtggttacgtagagaccttatttggacgtcgccgctatgttcccgatttaaacgctcgcgtgaaaggcaagcgtgaagccgccgaacgcatggcgttcaacatgcctgtacagggcacggcagctgacctcatgaaacttgcaatggtgcgcctttttccacaattgcgtgaagttggtgcccgcatgctcttgcaggtccacgatgaactcttgttagaagcgccaaaagagcgtgcggaagaggtggcagccggggcgaaagaagttatggaaggcgtgtggcccttagcggtgcctcttgaagtcgaagttggtattggcgaggattggctggctgccaaagga

SEQ ID NO: 6504 - protein, 841 aa, synthetic construct
  REGION 1..841: note = Variant of DNA polymerase I from Thermus sp. strain 2.9
MHHHHHHGGSGVLPVFEPKGRVLLVDGHHLAYRNFFALKGLTTSLGEPVQGVYGFAKSLLKALKEDGDVVIVVFDAKAPSFRHEAYEAYKAGRAPTPEDFPRQLALMKELVDLLGLERLEVPGFEADDVLATLAKKAEREGYEVQILTADRDLFQLLSPRISVLHPEGHRITPEWLWEKYGLRPEQWVDFRALAGDPSDNIPGVKGIGEKTALKLLKEWGSLENLLKNLDQVKPESVREKILAHLEDLKLSRELSRVRTDLPLEVDFGRRREPDWEGLKAFLERLEFGSLLHEFGLLESPLLAEEAPWPPPEGAFLGYRLSRPEPMWAELLALAASAQGRVYRAEDPHGALRGLFEVRGLLAKDLAVVALREGLDLPPTDDPMLLAYLLDPSNTTPEGVARRYGGEWTEDAAKRALLAERLHENLLGRLQGEERLLWLYEEVEKPLSRVLAHMEATGVKLDVAYLENLSLEVAAHMRRLEEEVFRLAGRSFRLNSRDQLERVLFDELGLPPIGKTEKTGKRSTSAAVLEALREVHPIVDKILQYREMAKLKGTYIDRLPALVHPKTGRLHTRFNQTATATGRLSSSDPNLQNIPVRTPLGQKIRRAFVAEEGWRLVALDYRQIELRVLAHLSGDENLIRVFQEGKDIHTQTASWMFGLSAEAIDPLMRRAAKTINFGVLYGMSAFRLSQELGIPYEEAQAFIQKYFQSYPKVKAWIEKTLREGRTRGYVETLFGRRRYVPDLNARVKGKREAAERMAFNMPVQGTAADLMKLAMVRLFPQLREVGARMLLQVHDELLLEAPKERAEEVAAGAKEVMEGVWPLAVPLEVEVGIGEDWLAAKG

SEQ ID NO: 6505 - DNA, 2523 bp, synthetic construct
  misc_feature 1..2523: note = Variant of DNA polymerase I from Thermus sp. strain 2.9
  source 1..2523: mol_type = other DNA
atgcaccatcatcatcatcatggcggtagcggcgtgttaccggtgttcgagcctaaaggtcgcgtgcttctggttgatggccatcatctcgcgtatcgtaacttctttgccctgaaaggattaaccaccagcctgggcgagccggtacagggtgtctacggctttgcaaagtcgctcctgaaagctctgaaagaagacggtgatgtggtgattgttgtctttgatgcgaaagcgccaagttttcgccacgaagcgtacgaagcttacaaagccgggcgtgctccaacgccggaagactttcctcgccaattggcgcttatgaaggaattagtggatttgcttggcctcgaacgcttggaagttcccggtttcgaggcagacgacgtattagcgactctcgcaaagaaagccgaacgtgagggctatgaagtccagatcttgacagcagatcgcgatcttttccagcttttatctccgcgcatctcggtgttacacccggaagggcatcgtatcaccccggaatggctctgggagaaatatggtttgcgtcccgaacaatgggtggattttcgcgccttagcaggcgatccgagcgacaatattccgggagttaaaggtatcggcgagaagacggcgctcaagctccttaaagaatgggggtcgttggagaacttgcttaagaatttagatcaggtcaaaccagagtcagtgcgtgagaagattcttgctcacctcgaagacctcaaattaagccgcgaattgtcccgtgtacgcaccgatttgccgctcgaagttgatttcggtcgccgccgcgaacctgactgggagggtcttaaagcgtttttagagcgtcttgaatttggttcgctcttgcatgaattcggccttttagaaagcccgttactggccgaagaagcaccttggccaccgcccgagggcgcgtttttaggttaccgtttgagtcgcccggaaccgatgtgggccgaattactggctcttgcagcgtctgcccagggacgtgtgtatcgcgcggaagaccctcatggtgcgctccgcggcctcttcgaagtccgtaccctccttgccaaagacttagctgttgttgcattgcgcgaaggtcttgatttacctccgactgatgatccaatgcttcttgcgtacctcttggacccgtcaaacacgacgcccgaaggcgtagcccgtcgttacggcggcgagtggaccgaagatgcagcgaaacgcgcgttattggccgaacgtttgcacgaaaatttattaggacgtttgcaaggcgaggaacgtctcctctggctttacgaagaagtggagaaaccattgagtcgcgtgctcgcgcatatggaagctaccggtgtcaaattagacgtggcgtatttggagaatctcagccttgaagttgctgcccacatgcgccgcttggaggaagaagtattccgtttagcaggccgttcctttcgccttaactctcgcgatcagttagaacgtgtgttgttcgatgaacttggtctccctcctatcggcaagacagagaagaccggtaaacgtagcacttcagcggcggttttagaagctcttcgcgaagtccatcccattgtggacaagatcttgcagtaccgcgaaatggcgaaattgaaaggcacctatattgaccgtcttccggcattagtccacccgaaaacgggacgcctccatacccgcttcaaccaaacagccacggcgaccggtcgtttgtcctcctctgatccaaaccttcagaatattccagtacgtaccccattgggccagaagatccgccgtgcgtttgtagctgaggagggttggcgtttagtggccctcgattatcgtcaaattgaattacgtgtccttgcccatctttctggcgatgagaacctcatccgcgtgtttcaggaaggcaaagacattcacactcaaacggcaagctggatgtttggattatcagctgaagcgatcgatcctttgatgcgtcgtgcagcgaagaccatcaatttcggtgttctctacggtatgagtgcctttcgtttgtcgcaggaattaggcattcccctggaagaagctcagggtttcattcagaaatactttcaaagctatcccaaagttaaagcatggatcgagaagactctccgtgaaggccgcacacgtggttacgtagagaccttatttggacgtcgccgctatgttcccgatttaaacgctcgcgtgaaaggcaagcgtgaagccgccgaacgcatggcgttcaacatgcctgtacagggcacggcagctgacctcatgaaacttgcaatggtgcgcctttttccacaattgcgtgaagttggtgcccgcatggatttgcaggtccacgatgaactcttgttagaagcgccaaaagagcgtgcggaagaggtggcagccctcgcgaaagaagttatggaaggcgtgtggcccttagcggtgcctcttgaagtcgaagttggtattggcgaggattggctggctgccaaagga

SEQ ID NO: 6506 - protein, 841 aa, synthetic construct
  REGION 1..841: note = Variant of DNA polymerase I from Thermus sp. strain 2.9
MHHHHHHGGSGVLPVFEPKGRVLLVDGHHLAYRNFFALKGLTTSLGEPVQGVYGFAKSLLKALKEDGDVVIVVFDAKAPSFRHEAYEAYKAGRAPTPEDFPRQLALMKELVDLLGLERLEVPGFEADDVLATLAKKAEREGYEVQILTADRDLFQLLSPRISVLHPEGHRITPEWLWEKYGLRPEQWVDFRALAGDPSDNIPGVKGIGEKTALKLLKEWGSLENLLKNLDQVKPESVREKILAHLEDLKLSRELSRVRTDLPLEVDFGRRREPDWEGLKAFLERLEFGSLLHEFGLLESPLLAEEAPWPPPEGAFLGYRLSRPEPMWAELLALAASAQGRVYRAEDPHGALRGLFEVRTLLAKDLAVVALREGLDLPPTDDPMLLAYLLDPSNTTPEGVARRYGGEWTEDAAKRALLAERLHENLLGRLQGEERLLWLYEEVEKPLSRVLAHMEATGVKLDVAYLENLSLEVAAHMRRLEEEVFRLAGRSFRLNSRDQLERVLFDELGLPPIGKTEKTGKRSTSAAVLEALREVHPIVDKILQYREMAKLKGTYIDRLPALVHPKTGRLHTRFNQTATATGRLSSSDPNLQNIPVRTPLGQKIRRAFVAEEGWRLVALDYRQIELRVLAHLSGDENLIRVFQEGKDIHTQTASWMFGLSAEAIDPLMRRAAKTINFGVLYGMSAFRLSQELGIPLEEAQGFIQKYFQSYPKVKAWIEKTLREGRTRGYVETLFGRRRYVPDLNARVKGKREAAERMAFNMPVQGTAADLMKLAMVRLFPQLREVGARMDLQVHDELLLEAPKERAEEVAALAKEVMEGVWPLAVPLEVEVGIGEDWLAAKG

SEQ ID NO: 6507 - DNA, 2523 bp, synthetic construct
  misc_feature 1..2523: note = Variant of DNA polymerase I from Thermus sp. strain 2.9
  source 1..2523: mol_type = other DNA
atgcaccatcatcatcatcatggcggtagcggcgtgttaccggtgttcgagcctaaaggtcgcgtgcttctggttgatggccatcatctcgcgtatcgtaacttctttgccctgaaaggattaaccaccagcctgggcgagccggtacagggtgtctacggctttgcaaagtcgctcctgaaagctctgaaagaagacggtgatgtggtgattgttgtctttgatgcgaaagcgccaagttttcgccacgaagcgtacgaagcttacaaagccgggcgtgctccaacgccggaagactttcctcgccaattggcgcttatgaaggaattagtggatttgcttggcctcgaacgcttggaagttcccggtttcgaggcagacgacgtattagcgactctcgcaaagaaagccgaacgtgagggctatgaagtccagatcttgacagcagatcgcgatcttttccagcttttatctccgcgcatctcggtgttacacccggaagggcatcgtatcaccccggaatggctctgggagaaatatggtttgcgtcccgaacaatgggtggattttcgcgccttagcaggcgatccgagcgacaatattccgggagttaaaggtatcggcgagaagacggcgctcaagctccttaaagaatgggggtcgttggagaacttgcttaagaatttagatcaggtcaaaccagagtcagtgcgtgagaagattcttgctcacctcgaagacctcaaattaagccgcgaattgtcccgtgtacgcaccgatttgccgctcgaagttgatttcggtcgccgccgcgaacctgactgggagggtcttaaagcgtttttagagcgtcttgaatttggttcgctcttgcatgaattcggccttttagaaagcccgttactggccgaagaagcaccttggccaccgcccgagggcgcgtttttaggttaccgtttgagtcgcccggaaccgatgtgggccgaattactggctcttgcagcgtctgcccagggacgtgtgtatcgcgcggaagaccctcatggtgcgctccgcggcctcttcgaagtccgtggactccttgccaaagacttagctgttgttgcattgcgcgaaggtcttgatttacctccgactgatgatccaatgcttcttgcgtacctcttggacccgtcaaacacgacgcccgaaggcgtagcccgtcgttacggcggcgagtggaccgaagatgcagcgaaacgcgcgttattggccgaacgtttgcacgaaaatttattaggacgtttgcaaggcgaggaacgtctcctctggctttacgaagaagtggagaaaccattgagtcgcgtgctcgcgcatatggaagctaccggtgtcaaattagacgtggcgtatttggagaatctcagccttgaagttgctgcccacatgcgccgcttggaggaagaagtattccgtttagcaggccgttcctttcgccttaactctcgcgatcagttagaacgtgtgttgttcgatgaacttggtctccctcctatcggcaagacagagaagaccggtaaacgtagcacttcagcggcggttttagaagctcttcgcgaagtccatcccattgtggacaagatcttgcagtaccgcgaaatggcgaaattgaaaggcacctatattgaccgtcttccggcattagtccacccgaaaacgggacgcctccatacccgcttcaaccaaacagccacggcgaccggtcgtttgtcctcctctgatccaaaccttcagaatattccagtacgtaccccattgggccagaagatccgccgtgcgtttgtagctgaggagggttggcgtttagtggccctcgattatcgtcaaattgaattacgtgtccttgcctgtctttctggcgatgagaacctcatccgcgtgtttcaggaaggcaaagacattcacactcaaacggcaagctggatgtttggattatcagctgaagcgatcgatcctttgatgcgtcgtgcagcgaagaccatcaatttcggtgttctctacggtatgagtgcctttcgtttgtcgcaggaattaggcattccctatgaagaagctcaggcgttcattcagaaatactttcaaagctatcccaaagttaaagcatggatcgagaagactctccgtgaaggccgcacacgtggttacgtagagaccttatttggacgtcgccgctatgttcccgatttaaacgctcgcgtgaaaggcaagcgtgaagccgccgaacgcatggcgttcaacatgcctgtacagggcacggcagctgacctcatgaaacttgcaatggtgcgcctttttccacaattgcgtgaagttggtgcccgcatgctcttgcaggtccacgatgaactcttgttagaagcgccaaaagagcgtgcggaagaggtggcagccctcgcgaaagaagttatggaaggcgtgtggcccttagcggtgcctcttgaagtcgaagttggtattggcgaggattggctggctgccaaagga

SEQ ID NO: 6508 - protein, 841 aa, synthetic construct
  REGION 1..841: note = Variant of DNA polymerase I from Thermus sp. strain 2.9
MHHHHHHGGSGVLPVFEPKGRVLLVDGHHLAYRNFFALKGLTTSLGEPVQGVYGFAKSLLKALKEDGDVVIVVFDAKAPSFRHEAYEAYKAGRAPTPEDFPRQLALMKELVDLLGLERLEVPGFEADDVLATLAKKAEREGYEVQILTADRDLFQLLSPRISVLHPEGHRITPEWLWEKYGLRPEQWVDFRALAGDPSDNIPGVKGIGEKTALKLLKEWGSLENLLKNLDQVKPESVREKILAHLEDLKLSRELSRVRTDLPLEVDFGRRREPDWEGLKAFLERLEFGSLLHEFGLLESPLLAEEAPWPPPEGAFLGYRLSRPEPMWAELLALAASAQGRVYRAEDPHGALRGLFEVRGLLAKDLAVVALREGLDLPPTDDPMLLAYLLDPSNTTPEGVARRYGGEWTEDAAKRALLAERLHENLLGRLQGEERLLWLYEEVEKPLSRVLAHMEATGVKLDVAYLENLSLEVAAHMRRLEEEVFRLAGRSFRLNSRDQLERVLFDELGLPPIGKTEKTGKRSTSAAVLEALREVHPIVDKILQYREMAKLKGTYIDRLPALVHPKTGRLHTRFNQTATATGRLSSSDPNLQNIPVRTPLGQKIRRAFVAEEGWRLVALDYRQIELRVLACLSGDENLIRVFQEGKDIHTQTASWMFGLSAEAIDPLMRRAAKTINFGVLYGMSAFRLSQELGIPYEEAQAFIQKYFQSYPKVKAWIEKTLREGRTRGYVETLFGRRRYVPDLNARVKGKREAAERMAFNMPVQGTAADLMKLAMVRLFPQLREVGARMLLQVHDELLLEAPKERAEEVAALAKEVMEGVWPLAVPLEVEVGIGEDWLAAKG

SEQ ID NO: 6509 - DNA, 2523 bp, synthetic construct
  misc_feature 1..2523: note = Variant of DNA polymerase I from Thermus sp. strain 2.9
  source 1..2523: mol_type = other DNA
atgcaccatcatcatcatcatggcggtagcggcgtgttaccggtgttcgagcctaaaggtcgcgtgcttctggttgatggccatcatctcgcgtatcgtaacttctttgccctgaaaggattaaccaccagcctgggcgagccggtacagggtgtctacggctttgcaaagtcgctcctgaaagctctgaaagaagacggtgatgtggtgattgttgtctttgatgcgaaagcgccaagttttcgccacgaagcgtacgaagcttacaaagccgggcgtgctccaacgccggaagactttcctcgccaattggcgcttatgaaggaattagtggatttgcttggcctcgaacgcttggaagttcccggtttcgaggcagacgacgtattagcgactctcgcaaagaaagccgaacgtgagggctatgaagtccagatcttgacagcagatcgcgatcttttccagcttttatctccgcgcatctcggtgttacacccggaagggcatcgtatcaccccggaatggctctgggagaaatatggtttgcgtcccgaacaatgggtggattttcgcgccttagcaggcgatccgagcgacaatattccgggagttaaaggtatcggcgagaagacggcgctcaagctccttaaagaatgggggtcgttggagaacttgcttaagaatttagatcaggtcaaaccagagtcagtgcgtgagaagattcttgctcacctcgaagacctcaaattaagccgcgaattgtcccgtgtacgcaccgatttgccgctcgaagttgatttcggtcgccgccgcgaacctgactgggagggtcttaaagcgtttttagagcgtcttgaatttggttcgctcttgcatgaattcggccttttagaaagcccgttactggccgaagaagcaccttggccaccgcccgagggcgcgtttttaggttaccgtttgagtcgcccggaaccgatgtgggccgaattactggctcttgcagcgtctgcccagggacgtgtgtatcgcgcggaagaccctcatggtgcgctccgcggcctcttcgaagtccgtggactccttgccaaagacttagctgttgttgcattgcgcgaaggtcttgatttacctccgactgatgatccaatgcttcttgcgtacctcttggacccgtcaaacacgacgcccgaaggcgtagcccgtcgttacggcggcgagtggaccgaagatgcagcgaaacgcgcgttattggccgaacgtttgcacgaaaatttattaggacgtttgcaaggcgaggaacgtctcctctggctttacgaagaagtggagaaaccattgagtcgcgtgctcgcgcatatggaagctaccggtgtcaaattagacgtggcgtatttggagaatctcagccttgaagttgctgcccacatgcgccgcttggaggaagaagtattccgtttagcaggccgttcctttcgccttaactctcgcgatcagttagaacgtgtgttgttcgatgaacttggtctccctcctatcggcaagacagagaagaccggtaaacgtagcacttcagcggcggttttagaagctcttcgcgaagtccatcccattgtggacaagatcttgcagtaccgcgaaatggcgaaattgaaaggcacctatattgaccgtcttccggcattagtccacccgaaaacgggacgcctccatacccgcttcaaccaaacagccacggcgaccggtcgtttgtcctcctctgatccaaaccttcagaatattccagtacgtacctgtttgggccagaagatccgccgtgcgtttgtagctgaggagggttggcgtttagtggccctcgattatcgtcaaattgaattacgtgtccttgcccatctttctggcgatgagaacctcatccgcgtgtttcaggaaggcaaagacattcacactcaaacggcaagctggatgtttggattatcagctgaagcgatcgatcctttgatgcgtcgtgcagcgaagaccatcaatttcggtgttctctacggtatgagtgcctttcgtttgtcgcaggaattaggcattccctatgaagaagctcaggcgttcattcagaaatactttcaaagctatcccaaagttaaagcatggatcgagaagactctccgtgaaggccgcacacgtggttacgtagagaccttatttggacgtcgccgctatgttcccgatttaaacgctcgcgtgaaaggcaagcgtgaagccgccgaacgcatggcgttcaacatgcctgtacagggcacggcagctgacctcatgaaacttgcaatggtgcgcctttttccacaattgcgtgaagttggtgcccgcatgctcttgcaggtccacgatgaactcttgttagaagcgccaaaagagcgtgcggaagaggtggcagccctcgcgaaagaagttatggaaggcgtgtggcccttagcggtgcctcttgaagtcgaagttggtattggcgaggattggctggctgccaaagga

SEQ ID NO: 6510 - protein, 841 aa, synthetic construct
  REGION 1..841: note = Variant of DNA polymerase I from Thermus sp. strain 2.9
MHHHHHHGGSGVLPVFEPKGRVLLVDGHHLAYRNFFALKGLTTSLGEPVQGVYGFAKSLLKALKEDGDVVIVVFDAKAPSFRHEAYEAYKAGRAPTPEDFPRQLALMKELVDLLGLERLEVPGFEADDVLATLAKKAEREGYEVQILTADRDLFQLLSPRISVLHPEGHRITPEWLWEKYGLRPEQWVDFRALAGDPSDNIPGVKGIGEKTALKLLKEWGSLENLLKNLDQVKPESVREKILAHLEDLKLSRELSRVRTDLPLEVDFGRRREPDWEGLKAFLERLEFGSLLHEFGLLESPLLAEEAPWPPPEGAFLGYRLSRPEPMWAELLALAASAQGRVYRAEDPHGALRGLFEVRGLLAKDLAVVALREGLDLPPTDDPMLLAYLLDPSNTTPEGVARRYGGEWTEDAAKRALLAERLHENLLGRLQGEERLLWLYEEVEKPLSRVLAHMEATGVKLDVAYLENLSLEVAAHMRRLEEEVFRLAGRSFRLNSRDQLERVLFDELGLPPIGKTEKTGKRSTSAAVLEALREVHPIVDKILQYREMAKLKGTYIDRLPALVHPKTGRLHTRFNQTATATGRLSSSDPNLQNIPVRTCLGQKIRRAFVAEEGWRLVALDYRQIELRVLAHLSGDENLIRVFQEGKDIHTQTASWMFGLSAEAIDPLMRRAAKTINFGVLYGMSAFRLSQELGIPYEEAQAFIQKYFQSYPKVKAWIEKTLREGRTRGYVETLFGRRRYVPDLNARVKGKREAAERMAFNMPVQGTAADLMKLAMVRLFPQLREVGARMLLQVHDELLLEAPKERAEEVAALAKEVMEGVWPLAVPLEVEVGIGEDWLAAKG

SEQ ID NO: 6511 - DNA, 2523 bp, synthetic construct
  misc_feature 1..2523: note = Variant of DNA polymerase I from Thermus sp. strain 2.9
  source 1..2523: mol_type = other DNA
atgcaccatcatcatcatcatggcggtagcggcgtgttaccggtgttcgagcctaaaggtcgcgtgcttctggttgatggccatcatctcgcgtatcgtaacttctttgccctgaaaggattaaccaccagcctgggcgagccggtacagggtgtctacggctttgcaaagtcgctcctgaaagctctgaaagaagacggtgatgtggtgattgttgtctttgatgcgaaagcgccaagttttcgccacgaagcgtacgaagcttacaaagccgggcgtgctccaacgccggaagactttcctcgccaattggcgcttatgaaggaattagtggatttgcttggcctcgaacgcttggaagttcccggtttcgaggcagacgacgtattagcgactctcgcaaagaaagccgaacgtgagggctatgaagtccagatcttgacagcagatcgcgatcttttccagcttttatctccgcgcatctcggtgttacacccggaagggcatcgtatcaccccggaatggctctgggagaaatatggtttgcgtcccgaacaatgggtggattttcgcgccttagcaggcgatccgagcgacaatattccgggagttaaaggtatcggcgagaagacggcgctcaagctccttaaagaatgggggtcgttggagaacttgcttaagaatttagatcaggtcaaaccagagtcagtgcgtgagaagattcttgctcacctcgaagacctcaaattaagccgcgaattgtcccgtgtacgcaccgatttgccgctcgaagttgatttcggtcgccgccgcgaacctgactgggagggtcttaaagcgtttttagagcgtcttgaatttggttcgctcttgcatgaattcggccttttagaaagcccgttactggccgaagaagcaccttggccaccgcccgagggcgcgtttttaggttaccgtttgagtcgcccggaaccgatgtgggccgaattactggctcttgcagcgtctgcccagggacgtgtgtatcgcgcggaagaccctcatggtgcgctccgcggcctcttcgaagtccgtggactccttgccaaagacttagctgttgttgcattgcgcgaaggtcttgatttacctccgactgatgatccaatgcttcttgcgtacctcttggacccgtcaaacacgacgcccgaaggcgtagcccgtcgttacggcggcgagtggaccgaagatgcagcgaaacgcgcgttattggccgaacgtttgcacgaaaatttattaggacgtttgcaaggcgaggaacgtctcctctggctttacgaagaagtggagaaaccattgagtcgcgtgctcgcgcatatggaagctaccggtgtcaaattagacgtggcgtatttggagaatctcagccttgaagttgctgcccacatgcgccgcttggaggaagaagtattccgtttagcaggccgttcctttcgccttaactctcgcgatcagttagaacgtgtgttgttcgatgaagggggtctccctcctatcggcaagacagagaagaccggtaaacgtagcacttcagcggcggttttagaagctcttcgcgaagtccatcccattgtggacaagatcttgcagtaccgcgaaatggcgaaattgaaaggcacctatattgaccgtcttccggcattagtccacccgaaaacgggacgcctccatacccgcttcaaccaaacagccacggcgaccggtcgtttgtcctcctctgatccaaaccttcagaatattccagtacgtaccccattgggccagaagatccgccgtgcgtttgtagctgaggagggttggcgtttagtggccctcgattatcgtcaaattgaattacgtgtccttgcccatctttctggcgatgagaacctcatccgcgtgtttcaggaaggcaaagacattcacactcaaacggcaagctggatgtttggattatcagctgaagcgatcgatcctttgatgcgtcgtgcagcgaagaccatcaatttcggtgttctctacggtatgagtgcctttcgtttgtcgcaggaattaggcattccctatgaagaagctcaggcgttcattcagaaatactttcaaagctatcccaaagttaaagcatggatcgagaagactctccgtgaaggccgcacacgtggttacgtagagaccttatttggacgtcgccgctatgttcccgatttaaacgctcgcgtgaaaggcaagcgtgaagccgccgaacgcatggcgttcaacatgcctgtacagggcacggcagctgacctcatgaaacttgcaatggtgcgcctttttccacaattgcgtgaagttggtgcccgcatgctcttgcaggtccacgatgaactcttgttagaagcgccaaaagagcgtgcggaagaggtggcagccctcgcgaaagaagttatggaaggcgtgtggcccttagcggtgcctcttgaagtcgaagttggtattggcgaggattggctggctgccaaagga

SEQ ID NO: 6512 - protein, 841 aa, synthetic construct
  REGION 1..841: note = Variant of DNA polymerase I from Thermus sp. strain 2.9
MHHHHHHGGSGVLPVFEPKGRVLLVDGHHLAYRNFFALKGLTTSLGEPVQGVYGFAKSLLKALKEDGDVVIVVFDAKAPSFRHEAYEAYKAGRAPTPEDFPRQLALMKELVDLLGLERLEVPGFEADDVLATLAKKAEREGYEVQILTADRDLFQLLSPRISVLHPEGHRITPEWLWEKYGLRPEQWVDFRALAGDPSDNIPGVKGIGEKTALKLLKEWGSLENLLKNLDQVKPESVREKILAHLEDLKLSRELSRVRTDLPLEVDFGRRREPDWEGLKAFLERLEFGSLLHEFGLLESPLLAEEAPWPPPEGAFLGYRLSRPEPMWAELLALAASAQGRVYRAEDPHGALRGLFEVRGLLAKDLAVVALREGLDLPPTDDPMLLAYLLDPSNTTPEGVARRYGGEWTEDAAKRALLAERLHENLLGRLQGEERLLWLYEEVEKPLSRVLAHMEATGVKLDVAYLENLSLEVAAHMRRLEEEVFRLAGRSFRLNSRDQLERVLFDEGGLPPIGKTEKTGKRSTSAAVLEALREVHPIVDKILQYREMAKLKGTYIDRLPALVHPKTGRLHTRFNQTATATGRLSSSDPNLQNIPVRTPLGQKIRRAFVAEEGWRLVALDYRQIELRVLAHLSGDENLIRVFQEGKDIHTQTASWMFGLSAEAIDPLMRRAAKTINFGVLYGMSAFRLSQELGIPYEEAQAFIQKYFQSYPKVKAWIEKTLREGRTRGYVETLFGRRRYVPDLNARVKGKREAAERMAFNMPVQGTAADLMKLAMVRLFPQLREVGARMLLQVHDELLLEAPKERAEEVAALAKEVMEGVWPLAVPLEVEVGIGEDWLAAKG

SEQ ID NO: 6513 - DNA, 2523 bp, synthetic construct
  misc_feature 1..2523: note = Variant of DNA polymerase I from Thermus sp. strain 2.9
  source 1..2523: mol_type = other DNA
atgcaccatcatcatcatcatggcggtagcggcgtgttaccggtgttcgagcctaaaggtcgcgtgcttctggttgatggccatcatctcgcgtatcgtaacttctttgccctgaaaggattaaccaccagcctgggcgagccggtacagggtgtctacggctttgcaaagtcgctcctgaaagctctgaaagaagacggtgatgtggtgattgttgtctttgatgcgaaagcgccaagttttcgccacgaagcgtacgaagcttacaaagccgggcgtgctccaacgccggaagactttcctcgccaattggcgcttatgaaggaattagtggatttgcttggcctcgaacgcttggaagttcccggtttcgaggcagacgacgtattagcgactctcgcaaagaaagccgaacgtgagggctatgaagtccagatcttgacagcagatcgcgatcttttccagcttttatctccgcgcatctcggtgttacacccggaagggcatcgtatcaccccggaatggctctgggagaaatatggtttgcgtcccgaacaatgggtggattttcgcgccttagcaggcgatccgagcgacaatattccgggagttaaaggtatcggcgagaagacggcgctcaagctccttaaagaatgggggtcgttggagaacttgcttaagaatttagatcaggtcaaaccagagtcagtgcgtgagaagattcttgctcacctcgaagacctcaaattaagccgcgaattgtcccgtgtacgcaccgatttgccgctcgaagttgatttcggtcgccgccgcgaacctgactgggagggtcttaaagcgtttttagagcgtcttgaatttggttcgctcttgcatgaattcggccttttagaaagcccgttactggccgaagaagcaccttggccaccgcccgagggcgcgtttttaggttaccgtttgagtcgcccggaaccgatgtgggccgaattactggctcttgcagcgtctgcccagggacgtgtgtatcgcgcggaagaccctcatggtgcgctccgcggcctcttcgaagtccgtggactccttgccaaagacttagctgttgttgcattgcgcgaaggtcttgatttacctccgactgatgatccaatgcttcttgcgtacctcttggacccgtcaaacacgacgccccgtggcgtagcccgtcgttacggcggcgagtggaccgaagatgcagcgaaacgcgcgttattggccgaacgtttgcacgaaaatttattaggacgtttgcaaggcgaggaacgtctcctctggctttacgaagaagtggagaaaccattgagtcgcgtgctcgcgcatatggaagctaccggtgtcaaattagacgtggcgtatttggagaatctcagccttgaagttgctgcccacatgcgccgcttggaggaagaagtattccgtttagcaggccgttcctttcgccttaactctcgcgatcagttagaacgtgtgttgttcgatgaacttggtctccctcctatcggcaagacagagaagaccggtaaacgtagcacttcagcggcggttttagaagctcttcgcgaagtccatcccattgtggacaagatcttgcagtaccgcgaaatggcgaaattgaaaggcacctatattgaccgtcttccggcattagtccacccgaaaacgggacgcctccatacccgcttcaaccaaacagccacggcgaccggtcgtttgtcctcctctgatccaaaccttcagaatattccagtacgtaccccattgggccagaagatccgccgtgcgtttgtagctgaggagggttggcgtttagtggccctcgattatcgtcaaattgaattacgtgtccttgcccatctttctggcgatgagaacctcatccgcgtgtttcaggaaggcaaagacattcacactcaaacggcaagctggatgtttggattatcagctgaagcgatcgatcctttgatgcgtcgtgcagcgaagaccatcaatttcggtgttctctacggtatgagtgcctttcgtttgtcgcaggaattaggcattccctatgaagaagctcaggcgttcattcagaaatactttcaaagctatcccaaagttaaagcatggatcgagaagactctccgtgaaggccgcacacgtggttacgtagagaccttatttggacgtcgccgctatgttcccgatttaaacgctcgcgtgaaaggcaagcgtgaagccgccgaacgcatggcgttcaacatgcctgtacagggcacggcagctgacctcatgaaacttgcaatggtgcgcctttttccacaattgcgtgaagttggtgcccgcatgctcttgcaggtccacgatgaactcttgttagaagcgccaaaagagcgtgcggaagaggtggcagccctcgcgaaagaagttatggaaggcgtgtggcccttagcggtgcctcttgaagtcgaagttggtattggcgaggattggctggctgccaaagga

SEQ ID NO: 6514 - protein, 841 aa, synthetic construct
  REGION 1..841: note = Variant of DNA polymerase I from Thermus sp. strain 2.9
MHHHHHHGGSGVLPVFEPKGRVLLVDGHHLAYRNFFALKGLTTSLGEPVQGVYGFAKSLLKALKEDGDVVIVVFDAKAPSFRHEAYEAYKAGRAPTPEDFPRQLALMKELVDLLGLERLEVPGFEADDVLATLAKKAEREGYEVQILTADRDLFQLLSPRISVLHPEGHRITPEWLWEKYGLRPEQWVDFRALAGDPSDNIPGVKGIGEKTALKLLKEWGSLENLLKNLDQVKPESVREKILAHLEDLKLSRELSRVRTDLPLEVDFGRRREPDWEGLKAFLERLEFGSLLHEFGLLESPLLAEEAPWPPPEGAFLGYRLSRPEPMWAELLALAASAQGRVYRAEDPHGALRGLFEVRGLLAKDLAVVALREGLDLPPTDDPMLLAYLLDPSNTTPRGVARRYGGEWTEDAAKRALLAERLHENLLGRLQGEERLLWLYEEVEKPLSRVLAHMEATGVKLDVAYLENLSLEVAAHMRRLEEEVFRLAGRSFRLNSRDQLERVLFDELGLPPIGKTEKTGKRSTSAAVLEALREVHPIVDKILQYREMAKLKGTYIDRLPALVHPKTGRLHTRFNQTATATGRLSSSDPNLQNIPVRTPLGQKIRRAFVAEEGWRLVALDYRQIELRVLAHLSGDENLIRVFQEGKDIHTQTASWMFGLSAEAIDPLMRRAAKTINFGVLYGMSAFRLSQELGIPYEEAQAFIQKYFQSYPKVKAWIEKTLREGRTRGYVETLFGRRRYVPDLNARVKGKREAAERMAFNMPVQGTAADLMKLAMVRLFPQLREVGARMLLQVHDELLLEAPKERAEEVAALAKEVMEGVWPLAVPLEVEVGIGEDWLAAKG

SEQ ID NO: 6515 - DNA, 2523 bp, synthetic construct
  misc_feature 1..2523: note = Variant of DNA polymerase I from Thermus sp. strain 2.9
  source 1..2523: mol_type = other DNA
atgcaccatcatcatcatcatggcggtagcggcgtgttaccggtgttcgagcctaaaggtcgcgtgcttctggttgatggccatcatctcgcgtatcgtaacttctttgccctgaaaggattaaccaccagcctgggcgagccggtacagggtgtctacggctttgcaaagtcgctcctgaaagctctgaaagaagacggtgatgtggtgattgttgtctttgatgcgaaagcgccaagttttcgccacgaagcgtacgaagcttacaaagccgggcgtgctccaacgccggaagactttcctcgccaattggcgcttatgaaggaattagtggatttgcttggccccgaacgcttggaagttcccggtttcgaggcagacgacgtattagcgactctcgcaaagaaagccgaacgtgagggctatgaagtccagatcttgacagcagatcgcgatcttttccagcttttatctccgcgcatctcggtgttacacccggaagggcatcgtatcaccccggaatggctctgggagaaatatggtttgcgtcccgaacaatgggtggattttcgcgccttagcaggcgatccgagcgacaatattccgggagttaaaggtatcggcgagaagacggcgctcaagctccttaaagaatgggggtcgttggagaacttgcttaagaatttagatcaggtcaaaccagagtcagtgcgtgagaagattcttgctcacctcgaagacctcaaattaagccgcgaattgtcccgtgtacgcaccgatttgccgctcgaagttgatttcggtcgccgccgcgaacctgactgggagggtcttaaagcgtttttagagcgtcttgaatttggttcgctcttgcatgaattcggccttttagaaagcccgttactggccgaagaagcaccttggccaccgcccgagggcgcgtttttaggttaccgtttgagtcgcccggaaccgatgtgggccgaattactggctcttgcagcgtctgcccagggacgtgtgtatcgcgcggaagaccctcatggtgcgctccgcggcctcttcgaagtccgtggactccttgccaaagacttagctgttgttgcattgcgcgaaggtcttgatttacctccgactgatgatccaatgcttcttgcgtacctcttggacccgtcaaacacgacgcccgaaggcgtagcccgtcgttacggcggcgagtggaccgaagatgcagcgaaacgcgcgttattggccgaacgtttgcacgaaaatttattaggacgtttgcaaggcgaggaacgtctcctctggctttacgaagaagtggagaaaccattgagtcgcgtgctcgcgcatatggaagctaccggtgtcaaattagacgtggcgtatttggagaatctttcgcttgaagttgctgcccacatgcgccgcttggaggaagaagtattccgtttagcaggccgttcctttcgccttaactctcgcgatcagttagaacgtgtgttgttcgatgaacttggtctccctcctatcggcaagacagagaagaccggtaaacgtagcacttcagcggcggttttagaagctcttcgcgaagtccatcccattgtggacaagatcttgcagtaccgcgaaatggcgaaattgaaaggcacctatattgaccgtcttccggcattagtccacccgaaaacgggacgcctccatacccgcttcaaccaaacagccacggcgaccggtcgtttgtcctcctctgatccaaaccttcagaatattccagtacgtaccccattgggccagaagatccgccgtgcgtttgtagctgaggagggttggcgtttagtggccctcgattatcgtcaaattgaattacgtgtccttgcccatctttctggcgatgagaacctcatccgcgtgtttcaggaaggcaaagacattcacactcaaacggcaagctggatgtttggattatcagctgaagcgatcgatcctttgatgcgtcgtgcagcgaagaccatcaatttcggtgttctctacggtatgagtgcctttcgtttgtcgcaggaattaggcattccctatgaagaagctcaggcgttcattcagaaatactttcaaagctatcccaaagttaaagcatggatcgagaagactctccgtgaaggccgcacacgtggttacgtagagaccttatttggacgtcgccgctatgttcccgatttaaacgctcgcgtgaaaggcaagcgtgaagccgccgaacgcatggcgttcaacatgcctgtacagggcacggcagctgacctcatgaaacttgcaatggtgcgcctttttccacaattgcgtgaagttggtgcccgcatgctcttgcaggtccacgatgaactcttgttagaagcgccaaaagagcgtgcggaagaggtggcagccctcgcgaaagaagttatggaaggcgtgtggcccttagcggtgcctcttgaagtcgaagttggtattggcgaggattggctggctgccaaagga

SEQ ID NO: 6516 - protein, 841 aa, synthetic construct
  REGION 1..841: note = Variant of DNA polymerase I from Thermus sp. strain 2.9
MHHHHHHGGSGVLPVFEPKGRVLLVDGHHLAYRNFFALKGLTTSLGEPVQGVYGFAKSLLKALKEDGDVVIVVFDAKAPSFRHEAYEAYKAGRAPTPEDFPRQLALMKELVDLLGPERLEVPGFEADDVLATLAKKAEREGYEVQILTADRDLFQLLSPRISVLHPEGHRITPEWLWEKYGLRPEQWVDFRALAGDPSDNIPGVKGIGEKTALKLLKEWGSLENLLKNLDQVKPESVREKILAHLEDLKLSRELSRVRTDLPLEVDFGRRREPDWEGLKAFLERLEFGSLLHEFGLLESPLLAEEAPWPPPEGAFLGYRLSRPEPMWAELLALAASAQGRVYRAEDPHGALRGLFEVRGLLAKDLAVVALREGLDLPPTDDPMLLAYLLDPSNTTPEGVARRYGGEWTEDAAKRALLAERLHENLLGRLQGEERLLWLYEEVEKPLSRVLAHMEATGVKLDVAYLENLSLEVAAHMRRLEEEVFRLAGRSFRLNSRDQLERVLFDELGLPPIGKTEKTGKRSTSAAVLEALREVHPIVDKILQYREMAKLKGTYIDRLPALVHPKTGRLHTRFNQTATATGRLSSSDPNLQNIPVRTPLGQKIRRAFVAEEGWRLVALDYRQIELRVLAHLSGDENLIRVFQEGKDIHTQTASWMFGLSAEAIDPLMRRAAKTINFGVLYGMSAFRLSQELGIPYEEAQAFIQKYFQSYPKVKAWIEKTLREGRTRGYVETLFGRRRYVPDLNARVKGKREAAERMAFNMPVQGTAADLMKLAMVRLFPQLREVGARMLLQVHDELLLEAPKERAEEVAALAKEVMEGVWPLAVPLEVEVGIGEDWLAAKG

SEQ ID NO: 6517 - DNA, 2523 bp, synthetic construct
  misc_feature 1..2523: note = Variant of DNA polymerase I from Thermus sp. strain 2.9
  source 1..2523: mol_type = other DNA
atgcaccatcatcatcatcatggcggtagcggcgtgttaccggtgttcgagcctaaaggtcgcgtgcttctggttgatggccatcatctcgcgtatcgtaacttctttgccctgaaaggattaaccaccagcctgggcgagccggtacagggtgtctacggctttgcaaagtcgctcctgaaagctctgaaagaagacggtgatgtggtgattgttgtctttgatgcgaaagcgccaagttttcgccacgaagcgtacgaagcttacaaagccgggcgtgctccaacgccggaagactttcctcgccaattggcgcttatgaaggaattagtggatttgcttggcctcgaacgcttggaagttcccggtttcgaggcagacgacgtattagcgactctcgcaaagaaagccgaacgtgagggctatgaagtccagatcttgacagcagatcgcgatcttttccagcttttatctccgcgcatctcggtgttacacccggaagggcatcgtatcaccccggaatggctctgggagaaatatggtttgcgtcccgaacaatgggtggattttcgcgccttagcaggcgatccgagcgacaatattccgggagttaaaggtatcggcgagaagacggcgctcaagctccttaaagaatgggggtcgttggagaacttgcttaagaatttagatcaggtcaaaccagagtcagtgcgtgagaagattcttgctcacctcgaagacctcaaattaagccgcgaattgtcccgtgtacgcaccgatttgccgctcgaagttgatttcggtcgccgccgcgaacctgactgggagggtcttaaagcgtttttagagcgtcttgaatttggttcgctcttgcatgaattcggccttttagaaagcccgttactggccgaagaagcaccttggccaccgcccgagggcgcgtttttaggttaccgtttgagtcgcccggaaccgatgtgggccgaattactggctcttgcagcgtctgcccagggacgtgtgtatcgcgcggaagaccctcatggtgcgctccgcggcctcttcgaagtccgtggactccttgccaaagacttagctgttgttgcattgcgcgaaggtcttgatttacctccgactgatgatccaatgcttcttgcgtacctcttggacccgtcaaacacgacgcccgaaggcgtagcccgtcgttacggcggcgagtggaccgaagatgcagcgaaacgcgcgttattggccgaacgtttgcacgaaaatttattaggacgtttgcaaggcgaggaacgtctcctctggctttacgaagaagtggagaaaccattgagtcgcgtgctcgcgcatatggaagctaccggtgtcaaattagacgtggcgtatttggagaatctcagccttgaagttgctgcccacatgcgccgcttggaggaagaagtattccgtttagcaggccgttcctttcgccttaactctcgcgatcagttagaacgtgtgttgttcgatgaacttggtctccctcctatcggcaagacagagaagaccggtaaacgtagcacttcagcggcggttttagaagctcttcgcgaagtccatcccattgtggacaagatcttgcagtaccgcgaaatggcgaaattgaaaggcacctatattgaccgtcttccggcattagtccacccgaaaacgggacgcctccatacccgcttcaaccaaacagccacggcgaccggtcgtttgtcctcctctgatccaaaccttcagaatattccagtatggaccccattgggccagaagatccgccgtgcgtttgtagctgaggagggttggcgtttagtggccctcgattatcgtcaaattgaattacgtgtccttgcccatctttctggcgatgagaacctcatccgcgtgtttcaggaaggcaaagacattcacactcaaacggcaagctggatgtttggattatcagctgaagcgatcgatcctttgatgcgtcgtgcagcgaagaccatcaatttcggtgttctctacggtatgagtgcctttcgtttgtcgcaggaattaggcattccctatgaagaagctcaggcgttcattcagaaatactttcaaagctatcccaaagttaaagcatggatcgagaagactctccgtgaaggccgcacacgtggttacgtagagaccttatttggacgtcgccgctatgttcccgatttaaacgctcgcgtgaaaggcaagcgtgaagccgccgaacgcatggcgttcaacatgcctgtacagggcacggcagctgacctcatgaaacttgcaatggtgcgcctttttccacaattgcgtgaagttggtgcccgcatgctcttgcaggtccacgatgaactcttgttagaagcgccaaaagagcgtgcggaagaggtggcagccctcgcgaaagaagttatggaaggcgtgtggcccttagcggtgcctcttgaagtcgaagttggtattggcgaggattggctggctgccaaagga

SEQ ID NO: 6518 - protein, 841 aa, synthetic construct
  REGION 1..841: note = Variant of DNA polymerase I from Thermus sp. strain 2.9
MHHHHHHGGSGVLPVFEPKGRVLLVDGHHLAYRNFFALKGLTTSLGEPVQGVYGFAKSLLKALKEDGDVVIVVFDAKAPSFRHEAYEAYKAGRAPTPEDFPRQLALMKELVDLLGLERLEVPGFEADDVLATLAKKAEREGYEVQILTADRDLFQLLSPRISVLHPEGHRITPEWLWEKYGLRPEQWVDFRALAGDPSDNIPGVKGIGEKTALKLLKEWGSLENLLKNLDQVKPESVREKILAHLEDLKLSRELSRVRTDLPLEVDFGRRREPDWEGLKAFLERLEFGSLLHEFGLLESPLLAEEAPWPPPEGAFLGYRLSRPEPMWAELLALAASAQGRVYRAEDPHGALRGLFEVRGLLAKDLAVVALREGLDLPPTDDPMLLAYLLDPSNTTPEGVARRYGGEWTEDAAKRALLAERLHENLLGRLQGEERLLWLYEEVEKPLSRVLAHMEATGVKLDVAYLENLSLEVAAHMRRLEEEVFRLAGRSFRLNSRDQLERVLFDELGLPPIGKTEKTGKRSTSAAVLEALREVHPIVDKILQYREMAKLKGTYIDRLPALVHPKTGRLHTRFNQTATATGRLSSSDPNLQNIPVWTPLGQKIRRAFVAEEGWRLVALDYRQIELRVLAHLSGDENLIRVFQEGKDIHTQTASWMFGLSAEAIDPLMRRAAKTINFGVLYGMSAFRLSQELGIPYEEAQAFIQKYFQSYPKVKAWIEKTLREGRTRGYVETLFGRRRYVPDLNARVKGKREAAERMAFNMPVQGTAADLMKLAMVRLFPQLREVGARMLLQVHDELLLEAPKERAEEVAALAKEVMEGVWPLAVPLEVEVGIGEDWLAAKG

SEQ ID NO: 6519 - DNA, 2523 bp, synthetic construct
  misc_feature 1..2523: note = Variant of DNA polymerase I from Thermus sp. strain 2.9
  source 1..2523: mol_type = other DNA
atgcaccatcatcatcatcatggcggtagcggcgtgttaccggtgttcgagcctaaaggtcgcgtgcttctggttgatggccatcatctcgcgtatcgtaacttctttgccctgaaaggattaaccaccagcctgggcgagccggtacagggtgtctacggctttgcaaagtcgctcctgaaagctctgaaagaagacggtgatgtggtgattgttgtctttgatgcgaaagcgccaagttttcgccacgaagcgtacgaagcttacaaagccgggcgtgctccaacgccggaagactttcctcgccaattggcgcttatgaaggaattagtggatttgcttggcctcgaacgcttggaagttcccggtttcgaggcagacgacgtattagcgactctcgcaaagaaagccgaacgtgagggctatgaagtccagatcttgacagcagatcgcgatcttttccagcttttatctccgcgcatctcggtgttacacccggaagggcatcgtatcaccccggaatggctctgggagaaatatggtttgcgtcccgaacaatgggtggattttcgcgccttagcaggcgatccgagcgacaatattccgggagttaaaggtatcggcgagaagacggcgctcaagctccttaaagaatgggggtcgttggagaacttgcttaagaatttagatcaggtcaaaccagagtcagtgcgtgagaagattcttgctcacctcgaagacctcaaattaagccgcgaattgtcccgtgtacgcaccgatttgccgctcgaagttgatttcggtcgccgccgcgaacctgactgggagggtcttaaagcgtttttagagcgtcttgaatttggttcgctcttgcatgaattcggccttttagaaagcccgttactggccgaagaagcaccttggccaccgcccgagggcgcgtttttaggttaccgtttgagtcgcccggaaccgatgtgggccgaattactggctcttgcagcgtctgcccagggacgtgtgtatcgcgcggaagaccctcatggtgcgctccgcggcctcttcgaagtccgtggactccttgccaaagacttagctgttgttgcattgcgcgaaggtcttgatttacctccgactgatgatccaatgcttcttgcgtacctcttggacccgtcaaacacgacgcccgaaggcgtagcccgtcgttacggcggcgagtggaccgaagatgcagcgaaacgcgcgttattggccgaacgtttgcacgaaaatttattaggacgtttgcaaggcgaggaacgtctcctctggctttacgaagaagtggagaaaccattgagtcgcgtgctcgcgcatatggaagctaccggtgtcaaattagacgtggcgtatttggagaatctcagccttgaagttgctgcccacatgcgccgcttggaggaagaagtattccgtttagcaggccgttcctttcgccttaactctcgcgatcagttagaacgtgtgttgttcgatgaacttggtctccctcctatcggcaagacagagaagaccggtaaacgtagcacttcagcggcggttttagaagctcttcgcgaagtccatcccattgtggacaagatcttgcagtaccgcgaaatggcgaaattgaaaggcacctatattgaccgtcttccggcattagtccacccgaaaacgggacgcctccatacccgcttcaaccaaacagccacggcgaccggtcgtttgtcctcctctgatccaaaccttcagaatattccagtacgtaccccattgggccagaagatccgccgtgcgtttgtagctgaggagggttggcgtttagtggccctcgattatcgtcaaattgaattacgtgtccttgcccatctttctggcgatgagaacctcatccgcgtgtttcaggaaggcaaagacattcacactcaaacggcaagctggatgtttggattatcagctgaagcgatcgatcctttgatgcgtcgtgcagcgaagaccatcaatttcggtgttctctacggtatgagtgcctttcgtttgtcgccggaattaggcattccctatgaagaagctcaggcgttcattcagaaatactttcaaagctatcccaaagttaaagcatggatcgagaagactctccgtgaaggccgcacacgtggttacgtagagaccttatttggacgtcgccgctatgttcccgatttaaacgctcgcgtgaaaggcaagcgtgaagccgccgaacgcatggcgttcaacatgcctgtacagggcacggcagctgacctcatgaaacttgcaatggtgcgcctttttccacaattgcgtgaagttggtgcccgcatgctcttgcaggtccacgatgaactcttgttagaagcgccaaaagagcgtgcggaagaggtggcagccctcgcgaaagaagttatggaaggcgtgtggcccttagcggtgcctcttgaagtcgaagttggtattggcgaggattggctggctgccaaagga

SEQ ID NO: 6520 - protein, 841 aa, synthetic construct
  REGION 1..841: note = Variant of DNA polymerase I from Thermus sp. strain 2.9
MHHHHHHGGSGVLPVFEPKGRVLLVDGHHLAYRNFFALKGLTTSLGEPVQGVYGFAKSLLKALKEDGDVVIVVFDAKAPSFRHEAYEAYKAGRAPTPEDFPRQLALMKELVDLLGLERLEVPGFEADDVLATLAKKAEREGYEVQILTADRDLFQLLSPRISVLHPEGHRITPEWLWEKYGLRPEQWVDFRALAGDPSDNIPGVKGIGEKTALKLLKEWGSLENLLKNLDQVKPESVREKILAHLEDLKLSRELSRVRTDLPLEVDFGRRREPDWEGLKAFLERLEFGSLLHEFGLLESPLLAEEAPWPPPEGAFLGYRLSRPEPMWAELLALAASAQGRVYRAEDPHGALRGLFEVRGLLAKDLAVVALREGLDLPPTDDPMLLAYLLDPSNTTPEGVARRYGGEWTEDAAKRALLAERLHENLLGRLQGEERLLWLYEEVEKPLSRVLAHMEATGVKLDVAYLENLSLEVAAHMRRLEEEVFRLAGRSFRLNSRDQLERVLFDELGLPPIGKTEKTGKRSTSAAVLEALREVHPIVDKILQYREMAKLKGTYIDRLPALVHPKTGRLHTRFNQTATATGRLSSSDPNLQNIPVRTPLGQKIRRAFVAEEGWRLVALDYRQIELRVLAHLSGDENLIRVFQEGKDIHTQTASWMFGLSAEAIDPLMRRAAKTINFGVLYGMSAFRLSPELGIPYEEAQAFIQKYFQSYPKVKAWIEKTLREGRTRGYVETLFGRRRYVPDLNARVKGKREAAERMAFNMPVQGTAADLMKLAMVRLFPQLREVGARMLLQVHDELLLEAPKERAEEVAALAKEVMEGVWPLAVPLEVEVGIGEDWLAAKG

SEQ ID NO: 6521 - DNA, 2523 bp, synthetic construct
  misc_feature 1..2523: note = Variant of DNA polymerase I from Thermus sp. strain 2.9
  source 1..2523: mol_type = other DNA
atgcaccatcatcatcatcatggcggtagcggcgtgttaccggtgttcgagcctaaaggtcgcgtgcttctggttgatggccatcatctcgcgtatcgtaacttctttgccctgaaaggattaaccaccagcctgggcgagccggtacagggtgtctacggctttgcaaagtcgctcctgaaagctctgaaagaagacggtgatgtggtgattgttgtctttgatgcgaaagcgccaagttttcgccacgaagcgtacgaagcttacaaagccgggcgtgctccaacgccggaagactttcctcgccaattggcgcttatgaaggaattagtggatttgcttggcctcgaacgcttggaagttcccggtttcgaggcagacgacgtattagcgactctcgcaaagaaagccgaacgtgagggctatgaagtccagatcttgacagcagatcgcgatcttttccagcttttatctccgcgcatctcggtgttacacccggaagggcatcgtatcaccccggaatggctctgggagaaatatggtttgcgtcccgaacaatgggtggattttcgcgccttagcaggcgatccgagcgacaatattccgggagttaaaggtatcggcgagaagacggcgctcaagctccttaaagaatgggggtcgttggagaacttgcttaagaatttagatcaggtcaaaccagagtcagtgcgtgagaagattcttgctcacctcgaagacctcaaattaagccgcgaattgtcccgtgtacgcaccgatttgccgctcgaagttgatttcggtcgccgccgcgaacctgactgggagggtcttaaagcgtttttagagcgtcttgaatttggttcgctcttgcatgaattcggccttttagaaagcccgttactggccgaagaagcaccttggccaccgcccgagggcgcgtttttaggttaccgtttgagtcgcccggaaccgatgtgggccgaattactggctcttgcagcgtctgcccagggacgtgtgtatcgcgcggaagaccctcatggtgcgctccgcggcctcttcgaagtccgtggactccttgccaaagacttagctgttgttgcattgcgcgaaggtcttgatttacctccgactgatgatccaatgcttcttgcgtacctcttggacccgtcaaacacgacgcccgaaggcgtagcccgtcgttacggcggcgagtggaccgaagatgcagcgaaacgcgcgttattggccgaacgtttgcacgaaaatttattaggacgtttgcaaggcgaggaacgtctcctctggctttacgaagaagtggagaaaccattgagtcgcgtgctcgcgcatatggaagctaccggtgtcaaattagacgtggcgtatttggagaatctcagccttgaagttgctgcccacatgcgccgcttggaggaagaagtattccgtttagcaggccgttcctttcgccttaactctcgcgatcagttagaacgtgtgttgttcgatgaacttggtctccctcctatcggcaagacagagaagaccggtaaacgtagcacttcagcggcggttttagaagctcttcgcgaagtccatcccattgtggacaagatcttgcagtaccgcgaaatggcgaaattgaaaggcacctatattgaccgtcttccggcattagtccacccgaaaacgggacgcctccatacccgcttcaaccaaacagccacggcgaccggtcgtttgtcctcctctgatccaaaccttcagaatattccagtacgtaccccattgggccagaagatccgccgtgcgtttgtagctgaggagggttggcgtttagtggccctcgattatcgtcaaattgaattacgtgtccttgcccatctttctggcgatgagaacctcatccgcgtgtttcaggaaggcaaagacattcacactcaaacggcaagctggatgtttggattatcagctgaagcgatcgatcctttgatgcgtcgtgcagcgaagaccatcaatttcggtgttctctacggtatgagtgcctttcgtttgtcgcaggaaaagggcattccctatgaagaagctcaggcgttcattcagaaatactttcaaagctatcccaaagttaaagcatggatcgagaagactctccgtgaaggccgcacacgtggttacgtagagaccttatttggacgtcgccgctatgttcccgatttaaacgctcgcgtgaaaggcaagcgtgaagccgccgaacgcatggcgttcaacatgcctgtacagggcacggcagctgacctcatgaaacttgcaatggtgcgcctttttccacaattgcgtgaagttggtgcccgcatgctcttgcaggtccacgatgaactcttgttagaagcgccaaaagagcgtgcggaagaggtggcagccctcgcgaaagaagttatggaaggcgtgtggcccttagcggtgcctcttgaagtcgaagttggtattggcgaggattggctggctgccaaagga

SEQ ID NO: 6522 - protein, 841 aa, synthetic construct
  REGION 1..841: note = Variant of DNA polymerase I from Thermus sp. strain 2.9
MHHHHHHGGSGVLPVFEPKGRVLLVDGHHLAYRNFFALKGLTTSLGEPVQGVYGFAKSLLKALKEDGDVVIVVFDAKAPSFRHEAYEAYKAGRAPTPEDFPRQLALMKELVDLLGLERLEVPGFEADDVLATLAKKAEREGYEVQILTADRDLFQLLSPRISVLHPEGHRITPEWLWEKYGLRPEQWVDFRALAGDPSDNIPGVKGIGEKTALKLLKEWGSLENLLKNLDQVKPESVREKILAHLEDLKLSRELSRVRTDLPLEVDFGRRREPDWEGLKAFLERLEFGSLLHEFGLLESPLLAEEAPWPPPEGAFLGYRLSRPEPMWAELLALAASAQGRVYRAEDPHGALRGLFEVRGLLAKDLAVVALREGLDLPPTDDPMLLAYLLDPSNTTPEGVARRYGGEWTEDAAKRALLAERLHENLLGRLQGEERLLWLYEEVEKPLSRVLAHMEATGVKLDVAYLENLSLEVAAHMRRLEEEVFRLAGRSFRLNSRDQLERVLFDELGLPPIGKTEKTGKRSTSAAVLEALREVHPIVDKILQYREMAKLKGTYIDRLPALVHPKTGRLHTRFNQTATATGRLSSSDPNLQNIPVRTPLGQKIRRAFVAEEGWRLVALDYRQIELRVLAHLSGDENLIRVFQEGKDIHTQTASWMFGLSAEAIDPLMRRAAKTINFGVLYGMSAFRLSQEKGIPYEEAQAFIQKYFQSYPKVKAWIEKTLREGRTRGYVETLFGRRRYVPDLNARVKGKREAAERMAFNMPVQGTAADLMKLAMVRLFPQLREVGARMLLQVHDELLLEAPKERAEEVAALAKEVMEGVWPLAVPLEVEVGIGEDWLAAKG

SEQ ID NO: 6523 - DNA, 2523 bp, synthetic construct
  misc_feature 1..2523: note = Variant of DNA polymerase I from Thermus sp. strain 2.9
  source 1..2523: mol_type = other DNA
atgcaccatcatcatcatcatggcggtagcggcgtgttaccggtgttcgagcctaaaggtcgcgtgcttctggttgatggccatcatctcgcgtatcgtaacttctttgccctgaaaggattaaccaccagccgcggcgagccggtacagggtgtctacggctttgcaaagtcgctcctgaaagctctgaaagaagacggtgatgtggtgattgttgtctttgatgcgaaagcgccaagttttcgccacgaagcgtacgaagcttacaaagccgggcgtgctccaacgccggaagactttcctcgccaattggcgcttatgaaggaattagtggatttgcttggcctcgaacgcttggaagttcccggtttcgaggcagacgacgtattagcgactctcgcaaagaaagccgaacgtgagggctatgaagtccagatcttgacagcagatcgcgatcttttccagcttttatctccgcgcatctcggtgttacacccggaagggcatcgtatcaccccggaatggctctgggagaaatatggtttgcgtcccgaacaatgggtggattttcgcgccttagcaggcgatccgagcgacaatattccgggagttaaaggtatcggcgagaagacggcgctcaagctccttaaagaatgggggtcgttggagaacttgcttaagaatttagatcaggtcaaaccagagtcagtgcgtgagaagattcttgctcacctcgaagacctcaaattaagccgcgaattgtcccgtgtacgcaccgatttgccgctcgaagttgatttcggtcgccgccgcgaacctgactgggagggtcttaaagcgtttttagagcgtcttgaatttggttcgctcttgcatgaattcggccttttagaaagcccgttaccggccgaagaagcaccttggccaccgcccgagggcgcgtttttaggttaccgtttgagtcgcccggaaccgatgtgggccgaattactggctcttgcagcgtctgcccagggacgtgtgtatcgcgcggaagaccctcatggtgcgctccgcggcctcttcgaagtccgtggactccttgccaaagacttagctgttgttgcattgcgcgaaggtcttgatttacctccgactgatgatccaatgcttcttgcgtacctcttggacccgtcaaacacgacgcccgaaggcgtagcccgtcgttacggcggcgagtggaccgaagatgcagcgaaacgcgcgttattggccgaacgtttgcacgcaaatttattaggacgtttgcaaggcgaggaacgtctcctctggctttacgaagaagtggagaaaccattgagtcgcgtgctcgcgcatatggaagctaccggtgtcaaattagacgtggcgtatttggagaatctcagccttgaagttgctgcccacatgcgccgcttggaggaagaagtattccgtttagcaggccgttcctttcgccttaactctcgcgatcagttagaacgtgtgttgttcgatgaacttggtctccctcctatcggcaagacagagaagaccggtaaacgtagcacttcagcggcggttttagaagctcttcgcgaagtccatcccattgtggacaagatcttgcagtaccgcgaactggcgaaattgaaaggcacctatattgaccgtcttccggcattagtccacccgaaaacgggacgcctccatacccgcttcaaccaaacagccacggcgaccggtcgtttgtcctcctctgatccaaaccttcagaatattccagtacgtaccccattgggccagaagatccgccgtgcgtttgtagctgaggagggttggcgtttagtggccctcgattatagtcaaattgaattacgtgtccttgcccatctttctggcgatgagaacctcatccgcgtgtttcaggaaggcaaagacattcacactcaaacggcaagctggatgtttggattatcagctgaagcgatcgatcctttgatgcgtcgtgcagcgaagaccatcaatttcggtgttctctacggtatgagtgcctttcgtttgtcgcaggaattaggcattccctatgaagaagctcaggcgttcattcagaaatactttcaaagctatcccaaagttaaagcatggatcgagaagactctcgaggaaggccgcacacgtggttacgtagagaccttatttggacgtcgccgctatgttcccgatttaaacgctcgcgtgaaaggcaagcgtgaagccgccgaacgcatggcgttcaacatgcctgtacagggcacggcagctgacctcatgaaacttgcaatggtgcgcctttttccacaattgcgtgaagttggtgcccgcatgctcttgcaggtccacgatgaactcttgttagaagcgccaaaagagcgtgcggaagaggtggcagccctcgcgaaagaagttatggaaggcgtgtggcccttagcggtgcctcttgaagtcgaagttggtattggcgaggattggctggctgccaaagga

SEQ ID NO: 6524 - protein, 841 aa, synthetic construct
  REGION 1..841: note = Variant of DNA polymerase I from Thermus sp. strain 2.9
MHHHHHHGGSGVLPVFEPKGRVLLVDGHHLAYRNFFALKGLTTSRGEPVQGVYGFAKSLLKALKEDGDVVIVVFDAKAPSFRHEAYEAYKAGRAPTPEDFPRQLALMKELVDLLGLERLEVPGFEADDVLATLAKKAEREGYEVQILTADRDLFQLLSPRISVLHPEGHRITPEWLWEKYGLRPEQWVDFRALAGDPSDNIPGVKGIGEKTALKLLKEWGSLENLLKNLDQVKPESVREKILAHLEDLKLSRELSRVRTDLPLEVDFGRRREPDWEGLKAFLERLEFGSLLHEFGLLESPLPAEEAPWPPPEGAFLGYRLSRPEPMWAELLALAASAQGRVYRAEDPHGALRGLFEVRGLLAKDLAVVALREGLDLPPTDDPMLLAYLLDPSNTTPEGVARRYGGEWTEDAAKRALLAERLHANLLGRLQGEERLLWLYEEVEKPLSRVLAHMEATGVKLDVAYLENLSLEVAAHMRRLEEEVFRLAGRSFRLNSRDQLERVLFDELGLPPIGKTEKTGKRSTSAAVLEALREVHPIVDKILQYRELAKLKGTYIDRLPALVHPKTGRLHTRFNQTATATGRLSSSDPNLQNIPVRTPLGQKIRRAFVAEEGWRLVALDYSQIELRVLAHLSGDENLIRVFQEGKDIHTQTASWMFGLSAEAIDPLMRRAAKTINFGVLYGMSAFRLSQELGIPYEEAQAFIQKYFQSYPKVKAWIEKTLEEGRTRGYVETLFGRRRYVPDLNARVKGKREAAERMAFNMPVQGTAADLMKLAMVRLFPQLREVGARMLLQVHDELLLEAPKERAEEVAALAKEVMEGVWPLAVPLEVEVGIGEDWLAAKG

SEQ ID NO: 6525 - DNA, 2523 bp, synthetic construct
  misc_feature 1..2523: note = Variant of DNA polymerase I from Thermus sp. strain 2.9
  source 1..2523: mol_type = other DNA
atgcaccatcatcatcatcatggcggtagcggcgtgttaccggtgttcgagcctaaaggtcgcgtgcttctggttgatggccatcatctcgcgtatcgtaacttctttgccctgaaaggattaaccaccagcctgggcgagccggtacagggtgtctacggctttgcaaagtcgctcctgaaagctctgaaagaagacggtgatgtggtgattgttgtctttgatgcgaaagcgccaagttttcgccacgaagcgtacgaagcttacaaagccgggcgtgctccaacgccggaagactttcctcgccaattggcgcttatgaaggaattagtggatttgcttggcctcgaacgcttggaagttcccggtttcgaggcagacgacgtattagcgactctcgcaaagaaagccgaacgtgagggctatgaagtccagatcttgacagcagatcgcgatcttttccagcttttatctccgcgcatctcggtgttacacccggaagggcatcgtatcaccccggaatggctctgggagaaatatggtttgcgtcccgaacaatgggtggattttcgcgccttagcaggcgatccgagcgacaatattccgggagttaaaggtatcggcgagaagacggcgctcaagctccttaaagaatgggggtcgttggagaacttgcttaagaatttagatcaggtcaaaccagagtcagtgcgtgagaagattcttgctcacctcgaagacctcaaattaagccgcgaattgtcccgtgtacgcaccgatttgccgctcgaagttgatttcggtcgccgccgcgaacctgactgggagggtcttaaagcgtttttagagcgtcttgaatttggttcgctcttgcatgaattcggccttttagaaagcccgttactggccgaagaagcaccttggccaccgcccgagggcgcgtttttaggttaccgtttgagtcgcccggaaccgatgtgggccgaattactggctcttgcagcgtctgcccagggacgtgtgtatcgcgcggaagaccctcatggtgcgctccgcggcctcttcgaagtccgtggactccttgccaaagacttagctgttgttgcattgcgcgaaggtcttgatttaccttatactgatgatccaatgcttcttgcgtacctcttggacccgtcaaacacgacgcccgaaggcgtagcccgtcgttacggcggcgagtggaccgaagatgcagcgaaacgcgcgttattggccgaacgtttgcacgaaaatttattaggacgtttgcaaggcgaggaacgtctcctctggctttacgaagaagtggagaaaccattgagtcgcgtgctcgcgcatatggaagctaccggtgtcaaattagacgtggcgtatttggagaatctcagccttgaagttgctgcccacatgcgccgcttggaggaagaagtattccgtttagcaggccgttcctttcgccttaactctcgcgatcagttagaacgtgtgttgttcgatgaacttggtctccctcctatcggcaagacagagaagaccggtaaacgtagcacttcagcggcggttttagaagctcttcgcgaagtccatcccattgtggacaagatcttgcagtaccgcgaaatggcgaaattgaaaggcacctatattgaccgtcttccggcattagtccacccgaaaacgggacgcctccatacccgcttcaaccaaacagccacggcgaccggtcgtttgtcctcctctgatccaaaccttcagaatattccagtacgtaccccattgggccagaagatccgccgtgcgtttgtagctgaggagggttggcgtttagtggccctcgattatcgtcaaattgaattacgtgtccttgcccatctttctggcgatgagaacctcatccgcgtgtttcaggaaggcaaagacattcacactcaaacggcaagctggatgtttggattatcagctgaagcgatcgatcctttgatgcgtcgtgcagcgaagaccatcaatttcggtgttctctacggtatgagtgcctttcgtttgtcgcaggaattaggcattccctatgaagaagctcaggcgttcattcagaaatactttcaaagctatcccaaagttaaagcatggatcgagaagactctccgtgaaggccgcacacgtggttacgtagagaccttatttggacgtcgccgctatgttcccgatttaaacgctcgcgtgaaaggcaagcgtgaagccgccgaacgcatggcgttcaacatgcctgtacagggcacggcagctgacctcatgaaacttgcaatggtgcgcctttttccacaattgcgtgaagttggtgcccgcatgctcttgcaggtccacgatgaactcttgttagaagcgccaaaagagcgtgcggaagaggtggcagccctcgcgaaagaagttatggaaggcgtgtggcccttagcggtgcctcttgaagtcgaagttggtattggcgaggattggctggctgccaaagga

SEQ ID NO: 6526 - protein, 841 aa, synthetic construct
  REGION 1..841: note = Variant of DNA polymerase I from Thermus sp. strain 2.9
MHHHHHHGGSGVLPVFEPKGRVLLVDGHHLAYRNFFALKGLTTSLGEPVQGVYGFAKSLLKALKEDGDVVIVVFDAKAPSFRHEAYEAYKAGRAPTPEDFPRQLALMKELVDLLGLERLEVPGFEADDVLATLAKKAEREGYEVQILTADRDLFQLLSPRISVLHPEGHRITPEWLWEKYGLRPEQWVDFRALAGDPSDNIPGVKGIGEKTALKLLKEWGSLENLLKNLDQVKPESVREKILAHLEDLKLSRELSRVRTDLPLEVDFGRRREPDWEGLKAFLERLEFGSLLHEFGLLESPLLAEEAPWPPPEGAFLGYRLSRPEPMWAELLALAASAQGRVYRAEDPHGALRGLFEVRGLLAKDLAVVALREGLDLPYTDDPMLLAYLLDPSNTTPEGVARRYGGEWTEDAAKRALLAERLHENLLGRLQGEERLLWLYEEVEKPLSRVLAHMEATGVKLDVAYLENLSLEVAAHMRRLEEEVFRLAGRSFRLNSRDQLERVLFDELGLPPIGKTEKTGKRSTSAAVLEALREVHPIVDKILQYREMAKLKGTYIDRLPALVHPKTGRLHTRFNQTATATGRLSSSDPNLQNIPVRTPLGQKIRRAFVAEEGWRLVALDYRQIELRVLAHLSGDENLIRVFQEGKDIHTQTASWMFGLSAEAIDPLMRRAAKTINFGVLYGMSAFRLSQELGIPYEEAQAFIQKYFQSYPKVKAWIEKTLREGRTRGYVETLFGRRRYVPDLNARVKGKREAAERMAFNMPVQGTAADLMKLAMVRLFPQLREVGARMLLQVHDELLLEAPKERAEEVAALAKEVMEGVWPLAVPLEVEVGIGEDWLAAKG

SEQ ID NO: 6527 - DNA, 2523 bp, synthetic construct
  misc_feature 1..2523: note = Variant of DNA polymerase I from Thermus sp. strain 2.9
  source 1..2523: mol_type = other DNA
atgcaccatcatcatcatcatggcggtagcggcgtgttaccggtgttcgagcctaaaggtcgcgtgcttctggttgatggccatcatctcgcgtatcgtaacttctttgccctgaaaggattaaccaccagcctgggcgagccggtacagggtgtctacggctttgcaaagtcgctcctgaaagctctgaaagaagacggtgatgtggtgattgttgtctttgatgcgaaagcgccaagttttcgccacgaagcgtacgaagcttacaaagccgggcgtgctccaacgccggaagactttcctcgccaattggcgcttatgaaggaattagtggatttgcttggcctcgaacgcttggaagttcccggtttcgaggcagacgacgtattagcgactctcgcaaagaaagccgaacgtgagggctatgaagtccagatcttgacagcagatcgcgatcttttccagcttttatctccgcgcatctcggtgttacacccggaagggcatcgtatcaccccggaatggctctgggagaaatatggtttgcgtcccgaacaatgggtggattttcgcgccttagcaggcgatccgagcgacaatattccgggagttaaaggtatcggcgagaagacggcgctcaagctccttaaagaatgggggtcgttggagaacttgcttaagaatttagatcaggtcaaaccagagtcagtgcgtgagaagattcttgctcacctcgaagacctcaaattaagccgcgaattgtcccgtgtacgcaccgatttgccgctcgaagttgatttcggtcgccgccgcgaacctgactgggagggtcttaaagcgtttttagagcgtcttgaatttggttcgctcttgcatgaattcggccttttagaaagcccgttactggccgaagaagcaccttggccaccgcccgagggcgcgtttttaggttaccgtttgagtcgcccggaaccgatgtgggccgaattactggctcttgcagcgtctgcccagggacgtgtgtatcgcgcggaagaccctcatggtgcgctccgcggcctcttcgaagtccgtggactccttgccaaagacttagctgttgttgcattgcgcgaaggtcttgatttacctccgactgatgatccaatgcttcttgcgtgcctcttggacccgtcaaacacgacgcccgaaggcgtagcccgtcgttacggcggcgagtggaccgaagatgcagcgaaacgcgcgttattggccgaacgtttgcacgaaaatttattaggacgtttgcaaggcgaggaacgtctcctctggctttacgaagaagtggagaaaccattgagtcgcgtgctcgcgcatatggaagctaccggtgtcaaattagacgtggcgtatttggagaatctcagccttgaagttgctgcccacatgcgccgcttggaggaagaagtattccgtttagcaggccgttcctttcgccttaactctcgcgatcagttagaacgtgtgttgttcgatgaacttggtctccctcctatcggcaagacagagaagaccggtaaacgtagcacttcagcggcggttttagaagctcttcgcgaagtccatcccattgtggacaagatcttgcagtaccgcgaaatggcgaaattgaaaggcacctatattgaccgtcttccggcattagtccacccgaaaacgggacgcctccatacccgcttcaaccaaacagccacggcgaccggtcgtttgtcctcctctgatccaaaccttcagaatattccagtacgtaccccattgggccagaagatccgccgtgcgtttgtagctgaggagggttggcgtttagtggccctcgattatcgtcaaattgaattacgtgtccttgccgagctttctggcgatgagaacctcatccgcgtgtttcaggaaggcaaagacattcacactcaaacggcaagctggatgtttggattatcagctgaagcgatcgatcctttgatgcgtcgtgcagcgaagaccatcaatttcggtgttctctacggtatgagtgcctttcgtttgtcgcaggaattaggcattccctatgaagaagctcaggcgttcattcagaaatactttcaaagctatcccaaagttaaagcatggatcgagaagactctccgtgaaggccgcacacgtggttacgtagagaccttatttggacgtcgccgctatgttcccgatttaaacgctcgcgtgaaaggcaagcgtgaagccgccgaacgcatggcgttcaacatgcctgtacagggcacggcagctgacctcatgaaacttgcaatggtgcgcctttttccacaattgcgtgaagttggtgcccgcatgctcttgcaggtccacgatgaactcttgttagaagcgccaaaagagcgtgcggaagaggtggcagccctcgcgaaagaagttatggaaggcgtgtggcccttagcggtgcctcttgaagtcgaagttggtattggcgaggattggctggctgccaaagga

SEQ ID NO: 6528 - protein, 841 aa, synthetic construct
  REGION 1..841: note = Variant of DNA polymerase I from Thermus sp. strain 2.9
MHHHHHHGGSGVLPVFEPKGRVLLVDGHHLAYRNFFALKGLTTSLGEPVQGVYGFAKSLLKALKEDGDVVIVVFDAKAPSFRHEAYEAYKAGRAPTPEDFPRQLALMKELVDLLGLERLEVPGFEADDVLATLAKKAEREGYEVQILTADRDLFQLLSPRISVLHPEGHRITPEWLWEKYGLRPEQWVDFRALAGDPSDNIPGVKGIGEKTALKLLKEWGSLENLLKNLDQVKPESVREKILAHLEDLKLSRELSRVRTDLPLEVDFGRRREPDWEGLKAFLERLEFGSLLHEFGLLESPLLAEEAPWPPPEGAFLGYRLSRPEPMWAELLALAASAQGRVYRAEDPHGALRGLFEVRGLLAKDLAVVALREGLDLPPTDDPMLLACLLDPSNTTPEGVARRYGGEWTEDAAKRALLAERLHENLLGRLQGEERLLWLYEEVEKPLSRVLAHMEATGVKLDVAYLENLSLEVAAHMRRLEEEVFRLAGRSFRLNSRDQLERVLFDELGLPPIGKTEKTGKRSTSAAVLEALREVHPIVDKILQYREMAKLKGTYIDRLPALVHPKTGRLHTRFNQTATATGRLSSSDPNLQNIPVRTPLGQKIRRAFVAEEGWRLVALDYRQIELRVLAELSGDENLIRVFQEGKDIHTQTASWMFGLSAEAIDPLMRRAAKTINFGVLYGMSAFRLSQELGIPYEEAQAFIQKYFQSYPKVKAWIEKTLREGRTRGYVETLFGRRRYVPDLNARVKGKREAAERMAFNMPVQGTAADLMKLAMVRLFPQLREVGARMLLQVHDELLLEAPKERAEEVAALAKEVMEGVWPLAVPLEVEVGIGEDWLAAKG

SEQ ID NO: 6529 - DNA, 2523 bp, synthetic construct
  misc_feature 1..2523: note = Variant of DNA polymerase I from Thermus sp. strain 2.9
  source 1..2523: mol_type = other DNA
atgcaccatcatcatcatcatggcggtagcggcgtgttaccggtgttcgagcctaaaggtcgcgtgcttctggttgatggccatcatctcgcgtatcgtaacttctttgccctgaaaggattaaccaccagcctgggcgagccggtacagggtgtctacggctttgcaaagtcgctcctgaaagctctgaaagaagacggtgatgtggtgattgttgtctttgatgcgaaagcgccaagttttcgccacgaagcgtacgaagcttacaaagccgggcgtgctccaacgccggaagactttcctcgccaattggcgcttatgaaggaattagtggatttgcttggcctcgaacgcttggaagttcccggtttcgaggcagacgacgtattagcgactctcgcaaagaaagccgaacgtgagggctatgaagtccagatcttgacagcagatcgcgatcttttccagcttttatctccgcgcatctcggtgttacacccggaagggcatcgtatcaccccggaatggctctgggagaaatatggtttgcgtcccgaacaatgggtggattttcgcgccttagcaggcgatccgagcgacaatattccgggagttaaaggtatcggcgagaagacggcgctcaagctccttaaagaatgggggtcgttggagaacttgcttaagaatttagatcaggtcaaaccagagtcagtgcgtgagaagattcttgctcacctcgaagacctcaaattaagccgcgaattgtcccgtgtacgcaccgatttgccgctcgaagttgatttcggtcgccgccgcgaacctgactgggagggtcttaaagcgtttttagagcgtcttgaatttggttcgctcttgcatgaattcggccttttagaaagcccgttactggccgaagaagcaccttggccaccgcccgagggcgcgtttttaggttaccgtttgagtcgcccggaaccgatgtgggccgaattactggctcttgcagcgtctgcccagggacgtgtgtatcgcgcggaagaccctcatggtgcgctccgcggcctcttcgaagtccgtaccctccttgccaaagacttagctgttgttgcattgcgcgaaggtcttgatttacctccgactgatgatccaatgcttcttgcgtacctcttggacccgtcaaacacgacgcccgaaggcgtagcccgtcgttacggcggcgagtggaccgaagatgcagccaaacgcgcgttattggccgaacgtttgcacgaaaatttattaggacgtttgcaaggcgaggaacgtctcctctggctttacgaagaagtggagaaaccattgagtcgcgtgctcgcgcatatggaagctaccggtgtcaaattagacgtggcgtatttggagaatctcctgcttgaagttgctgcccacatgcgccgcttggaggaagaagtattccgtttagcaggccgttcctttcgccttaactctcgcgatcagttagaacgtgtgttgttcgatgaacttggtctccctcctatcggcaagacagagaagaccggtaaacgtagcacttcagcggcggttttagaagctcttcgcgaagtccatcccattgtggacaagatcttgcagtaccgcgaaatggcgaaattgaaaggcacctatattgaccgtcttccggcattagtccacccgaaaacgggacgcctccatacccgcttcaaccaaacagccacggcgaccggtcgtttgtcctcctctgatccaaaccttcagaatattccagtacgtaccccattgggccagaagatccgccgtgcgtttgtagctgagccgggttggcgtttagtggccctcgattatcgtcaaattgaattacgtgtccttgcccatctttctggcgatgagaacctcatccgcgtgtttcaggaaggcaaagacattcacactcaaacggcaagctggatgtttggattatcagctgaagcgatcgatcctttgatgcgtcgtgcagcgaagaccatcaatttcggtgttctctacggtatgagtgcctttcgtttgtcgcaggaattaggcattccctatgaagaagctcagggtttcattcagaaatactttcaaagctatcccaaagttaaagcatggatcgagaagactctccgtgaaggccgcacacgtggttacgtagagaccttatttggacgtcgccgctatgttcccgatttaaacgctcgcgtgaaaggcaagcgtgaagccgccgaacgcatggcgttcaacatgcctgtacagggcacggcagctgacctcatgaaacttgcaatggtgcgcctttttccacaattgcgtgaagttggtgcccgcatgctgttgcaggtccacgatgaactcttgttagaagcgccaaaagagcgtgcggaagaggtggcagccctcgcgaaagaagttatggaaggcgtgtggcccttagcggtgcctcttgaagtcgaagttggtattggcgaggattggctggctgccaaagga

SEQ ID NO: 6530 - protein, 841 aa, synthetic construct
  REGION 1..841: note = Variant of DNA polymerase I from Thermus sp. strain 2.9
MHHHHHHGGSGVLPVFEPKGRVLLVDGHHLAYRNFFALKGLTTSLGEPVQGVYGFAKSLLKALKEDGDVVIVVFDAKAPSFRHEAYEAYKAGRAPTPEDFPRQLALMKELVDLLGLERLEVPGFEADDVLATLAKKAEREGYEVQILTADRDLFQLLSPRISVLHPEGHRITPEWLWEKYGLRPEQWVDFRALAGDPSDNIPGVKGIGEKTALKLLKEWGSLENLLKNLDQVKPESVREKILAHLEDLKLSRELSRVRTDLPLEVDFGRRREPDWEGLKAFLERLEFGSLLHEFGLLESPLLAEEAPWPPPEGAFLGYRLSRPEPMWAELLALAASAQGRVYRAEDPHGALRGLFEVRTLLAKDLAVVALREGLDLPPTDDPMLLAYLLDPSNTTPEGVARRYGGEWTEDAAKRALLAERLHENLLGRLQGEERLLWLYEEVEKPLSRVLAHMEATGVKLDVAYLENLLLEVAAHMRRLEEEVFRLAGRSFRLNSRDQLERVLFDELGLPPIGKTEKTGKRSTSAAVLEALREVHPIVDKILQYREMAKLKGTYIDRLPALVHPKTGRLHTRFNQTATATGRLSSSDPNLQNIPVRTPLGQKIRRAFVAEPGWRLVALDYRQIELRVLAHLSGDENLIRVFQEGKDIHTQTASWMFGLSAEAIDPLMRRAAKTINFGVLYGMSAFRLSQELGIPYEEAQGFIQKYFQSYPKVKAWIEKTLREGRTRGYVETLFGRRRYVPDLNARVKGKREAAERMAFNMPVQGTAADLMKLAMVRLFPQLREVGARMLLQVHDELLLEAPKERAEEVAALAKEVMEGVWPLAVPLEVEVGIGEDWLAAKG

SEQ ID NO: 6531 - DNA, 2523 bp, synthetic construct
  misc_feature 1..2523: note = Variant of DNA polymerase I from Thermus sp. strain 2.9
  source 1..2523: mol_type = other DNA
atgcaccatcatcatcatcatggcggtagcggcgtgttaccggtgttcgagcctaaaggtcgcgtgcttctggttgatggccatcatctcgcgtatcgtaacttctttgccctgaaaggattaaccaccagcctgggcgagccggtacagggtgtctacggctttgcaaagtcgctcctgaaagctctgaaagaagacggtgatgtggtgattgttgtctttgatgcgaaagcgccaagttttcgccacgaagcgtacgaagcttacaaagccgggcgtgctccaacgccggaagactttcctcgccaattggcgcttatgaaggaattagtggatttgcttggcctcgaacgcttggaagttcccggtttcgaggcagacgacgtattagcgactctcgcaaagaaagccgaacgtgagggctatgaagtccagatcttgacagcagatcgcgatcttttccagcttttatctccgcgcatctcggtgttacacccggaagggcatcgtatcaccccggaatggctctgggagaaatatggtttgcgtcccgaacaatgggtggattttcgcgccttagcaggcgatccgagcgacaatattccgggagttaaaggtatcggcgagaagacggcgctcaagctccttaaagaatgggggtcgttggagaacttgcttaagaatttagatcaggtcaaaccagagtcagtgcgtgagaagattcttgctcacctcgaagacctcaaattaagccgcgaattgtcccgtgtacgcaccgatttgccgctcgaagttgatttcggtcgccgccgcgaacctgactgggagggtcttaaagcgtttttagagcgtcttgaatttggttcgctcttgcatgaattcggccttttagaaagcccgttactggccgaagaagcaccttggccaccgcccgagggcgcgtttttaggttaccgtttgagtcgcccggaaccgatgtgggccgaattactggctcttgcagcgtctgcccagggacgtgtgtatcgcgcggaagaccctcatggtgcgctccgcggcctcttcgaagtccgtggactccttgccaaagacttagctgttgttgcattgcgcgaaggtcttgatttacctccgactgatgatccaatgcttcttgcgtacctcttggacccgtcaaacacgacgcccgaaggcgtagcccgtcgttacggcggcgagtggaccgaagatgcagcgaaacgcgcgttattggccgaacgtttgcacgaaaatttattaggacgtttgcaaggcgaggaacgtctcctctggctttacgaagaagtggagaaaccattgagtcgctggctcgcgcatatggaagctaccggtgtcaaattagacgtggcgtatttggagaatctcagccttgaagttgctgcccacatgcgccgcttggaggaagaagtattccgtttagcaggccgttcctttcgccttaactctcgcgatcagttagaacgtgtgttgttcgatgaacttggtctccctcctatcggcaagacagagaagaccggtaaacgtagcacttcagcggcggttttagaagctcttcgcgaagtccatcccattgtggacaagatcttgcagtaccgcgaaatggcgaaattgaaaggcacctatattgaccgtcttccggcattagtccacccgaaaacgggacgcctccatacccgcttcaaccaaacagccacggcgaccggtcgtttgtcctcctctgatccaaaccttcagaatattccagtacgtaccccattgggccagaagatccgccgtgcgtttgtagctgaggagggttggcgtttagtggccctcgattatcgtcaaattgaattacgtgtccttgcccatctttctggcgatgagaacctcatccgcgtgtttcaggaaggcaaagacattcacactcaaacggcaagctggatgtttggattatcagctgaagcgatcgatcctttgatgcgtcgtgcagcgaagaccatcaatttcggtgttctctacggtatgagtgcctttcgtttgtcgcaggaattaggcattccctatgaagaagctcaggcgttcattcagaaatactttcaaagctatcccaaagttaaagcatggatcgagaagactctccgtgaaggccgcacacgtggttacgtagagaccttatttggacgtcgccgctatgttcccgatttaaacgctcgcgtgaaaggcaagcgtgaagccgccgaacgcatggcgttcaacatgcctgtacagggcacggcagctgacctcatgaaacttgcaatggtgcgcctttttccacaattgcgtgaagttggtgcccgcatgctcttgcaggtccacgatgaactcttgttagaagcgccaaaagagcgtgcggaagaggtggcagccctcgcgaaagaagttatggaaggcgtgtggcccttagcggtgcctcttgaagtcgaagttggtattggcgaggattggctggctgccaaagga

SEQ ID NO: 6532 - protein, 841 aa, synthetic construct
  REGION 1..841: note = Variant of DNA polymerase I from Thermus sp. strain 2.9
MHHHHHHGGSGVLPVFEPKGRVLLVDGHHLAYRNFFALKGLTTSLGEPVQGVYGFAKSLLKALKEDGDVVIVVFDAKAPSFRHEAYEAYKAGRAPTPEDFPRQLALMKELVDLLGLERLEVPGFEADDVLATLAKKAEREGYEVQILTADRDLFQLLSPRISVLHPEGHRITPEWLWEKYGLRPEQWVDFRALAGDPSDNIPGVKGIGEKTALKLLKEWGSLENLLKNLDQVKPESVREKILAHLEDLKLSRELSRVRTDLPLEVDFGRRREPDWEGLKAFLERLEFGSLLHEFGLLESPLLAEEAPWPPPEGAFLGYRLSRPEPMWAELLALAASAQGRVYRAEDPHGALRGLFEVRGLLAKDLAVVALREGLDLPPTDDPMLLAYLLDPSNTTPEGVARRYGGEWTEDAAKRALLAERLHENLLGRLQGEERLLWLYEEVEKPLSRWLAHMEATGVKLDVAYLENLSLEVAAHMRRLEEEVFRLAGRSFRLNSRDQLERVLFDELGLPPIGKTEKTGKRSTSAAVLEALREVHPIVDKILQYREMAKLKGTYIDRLPALVHPKTGRLHTRFNQTATATGRLSSSDPNLQNIPVRTPLGQKIRRAFVAEEGWRLVALDYRQIELRVLAHLSGDENLIRVFQEGKDIHTQTASWMFGLSAEAIDPLMRRAAKTINFGVLYGMSAFRLSQELGIPYEEAQAFIQKYFQSYPKVKAWIEKTLREGRTRGYVETLFGRRRYVPDLNARVKGKREAAERMAFNMPVQGTAADLMKLAMVRLFPQLREVGARMLLQVHDELLLEAPKERAEEVAALAKEVMEGVWPLAVPLEVEVGIGEDWLAAKG

SEQ ID NO: 6533 - DNA, 2523 bp, synthetic construct
  misc_feature 1..2523: note = Variant of DNA polymerase I from Thermus sp. strain 2.9
  source 1..2523: mol_type = other DNA
atgcaccatcatcatcatcatggcggtagcggcgtgttaccggtgttcgagcctaaaggtcgcgtgcttctggttgatggccatcatctcgcgtatcgtaacttctttgccctgaaaggattaaccaccagcctgggcgagccggtacagggtgtctacggctttgcaaagtcgctcctgaaagctctgaaagaagacggtgatgtggtgattgttgtctttgatgcgaaagcgccaagttttcgccacgaagcgtacgaagcttacaaagccgggcgtgctccaacgccggaagactttcctcgccaattggcgcttatgaaggaattagtggatttgcttggcctcgaacgcttggaagttcccggtttcgaggcagacgacgtattagcgactctcgcaaagaaagccgaacgtgagggctatgaagtccagatcttgacagcagatcgcgatcttttccagcttttatctccgcgcatctcggtgttacacccggaagggcatcgtatcaccccggaatggctctgggagaaatatggtttgcgtcccgaacaatgggtggattttcgcgccttagcaggcgatccgagcgacaatattccgggagttaaaggtatcggcgagaagacggcgctcaagctccttaaagaatgggggtcgttggagaacttgcttaagaatttagatcaggtcaaaccagagtcagtgcgtgagaagattcttgctcacctcgaagacctcaaattaagccgcgaattgtcccgtgtacgcaccgatttgccgctcgaagttgatttcggtcgccgccgcgaacctgactgggagggtcttaaagcgtttttagagcgtcttgaatttggttcgctcttgcatgaattcggccttttagaaagcccgttactggccgaagaagcaccttggccaccgcccgagggcgcgtttttaggttaccgtttgagtcgcccggaaccgatgtgggccgaattactggctcttgcagcgtctgcccagggacgtgtgtatcgcgcggaagaccctcatggtgcgctccgcggcctcttcgaagtccgtggactccttgccaaagacttagctgttgttgcattgcgcgaaggtcttgatttacctccgactgatgatccaatgcttcttgcgtacctcttggacccgtcaaacacgacgcccgaaggcgtagcccgtcgttacggcggcgagtggaccgaagatgcagcgaaacgcgcgttattggccgaacgtttgcacgaaaatttattaggacgtttgcaaggcgaggaacgtctcctctggctttacgaagaagtggagaaaccattgagtcgcgtgctcgcgcatatggaagctaccggtgtcaaattagacgtggcgtatttggagaatctcagccttgaagttgctgcccacatgcgccgcttggaggaagaagtattccgtttagcaggccgttcctttcgccttaactctcgcgatcagttagaacgtgtgttgttcgatgaacttggtctccctcctatcggcaagacagagaagaccggtaaacgtagcacttcagcggcggttttagaagctcttcgcgaagtccatcccattgtggacaagatcttgcagtaccgcgaaatggcgaaattgaaaggcacctatattgaccgtcttccggcattagtccacccgaaaacgggacgcctccatacccgcttcaaccaaacagccacggcgaccggtcgtttgtcctcctctgatccaaaccttcagaatattccagtacgtaccccattgggccagaagatccgccgtgcgtttgtagctgaggagggttggcgtttagtggccctcgattatcgtcaaattgaattacgtgtccttgcccatctttctggcgatgagaacctcatccgcgtgtttcaggaaggcaaagacattcacactcaaacggcaagctggatgtttggattatcagctgaagcgatcgatcctttgatgcgtcgtgcagcgaagaccatcaatttcggtgttctctacggtatgagtgcctttcgtttgtcgcaggaattaggcattccctatgaagaagctcaggcgttcattcagaaatactttcaaagctatcccaaagttaaagcatggatcgagaagactctccgtgaaggccgcacacgtggttacgtagagaccttatttggacgtcgccgctatgttcccgatttaaacgcttgtgtgaaaggcaagcgtgaagccgccgaacgcatggcgttcaacatgcctgtacagggcacggcagctgacctcatgaaacttgcaatggtgcgcctttttccacaattgcgtgaagttggtgcccgcatgctcttgcaggtccacgatgaactcttgttagaagcgccaaaagagcgtgcggaagaggtggcagccctcgcgaaagaagttatggaaggcgtgtggcccttagcggtgcctcttgaagtcgaagttggtattggcgaggattggctggctgccaaagga

SEQ ID NO: 6534 - protein, 841 aa, synthetic construct
  REGION 1..841: note = Variant of DNA polymerase I from Thermus sp. strain 2.9
MHHHHHHGGSGVLPVFEPKGRVLLVDGHHLAYRNFFALKGLTTSLGEPVQGVYGFAKSLLKALKEDGDVVIVVFDAKAPSFRHEAYEAYKAGRAPTPEDFPRQLALMKELVDLLGLERLEVPGFEADDVLATLAKKAEREGYEVQILTADRDLFQLLSPRISVLHPEGHRITPEWLWEKYGLRPEQWVDFRALAGDPSDNIPGVKGIGEKTALKLLKEWGSLENLLKNLDQVKPESVREKILAHLEDLKLSRELSRVRTDLPLEVDFGRRREPDWEGLKAFLERLEFGSLLHEFGLLESPLLAEEAPWPPPEGAFLGYRLSRPEPMWAELLALAASAQGRVYRAEDPHGALRGLFEVRGLLAKDLAVVALREGLDLPPTDDPMLLAYLLDPSNTTPEGVARRYGGEWTEDAAKRALLAERLHENLLGRLQGEERLLWLYEEVEKPLSRVLAHMEATGVKLDVAYLENLSLEVAAHMRRLEEEVFRLAGRSFRLNSRDQLERVLFDELGLPPIGKTEKTGKRSTSAAVLEALREVHPIVDKILQYREMAKLKGTYIDRLPALVHPKTGRLHTRFNQTATATGRLSSSDPNLQNIPVRTPLGQKIRRAFVAEEGWRLVALDYRQIELRVLAHLSGDENLIRVFQEGKDIHTQTASWMFGLSAEAIDPLMRRAAKTINFGVLYGMSAFRLSQELGIPYEEAQAFIQKYFQSYPKVKAWIEKTLREGRTRGYVETLFGRRRYVPDLNACVKGKREAAERMAFNMPVQGTAADLMKLAMVRLFPQLREVGARMLLQVHDELLLEAPKERAEEVAALAKEVMEGVWPLAVPLEVEVGIGEDWLAAKG

SEQ ID NO: 6535 - DNA, 2523 bp, synthetic construct
  misc_feature 1..2523: note = Variant of DNA polymerase I from Thermus sp. strain 2.9
  source 1..2523: mol_type = other DNA
atgcaccatcatcatcatcatggcggtagcggcgtgttaccggtgttcgagcctaaaggtcgcgtgcttctggttgatggccatcatctcgcgtatcgtaacttctttgccctgaaaggattaaccaccagcctgggcgagccggtacagggtgtctacggctttgcaaagtcgctcctgaaagctctgaaagaagacggtgatgtggtgattgttgtctttgatgcgaaagcgccaagttttcgccacgaagcgtacgaagcttacaaagccgggcgtgctccaacgccggaagactttcctcgccaattggcgcttatgaaggaattagtggatttgcttggcctcgaacgcttggaagttcccggtttcgaggcagacgacgtattagcgactctcgcaaagaaagccgaacgtgagggctatgaagtccagatcttgacagcagatcgcgatcttttccagcttttatctccgcgcatctcggtgttacacccggaagggcatcgtatcaccccggaatggctctgggagaaatatggtttgcgtcccgaacaatgggtggattttcgcgccttagcaggcgatccgagcgacaatattccgggagttaaaggtatcggcgagaagacggcgctcaagctccttaaagaatgggggtcgttggagaacttgcttaagaatttagatcaggtcaaaccagagtcagtgcgtgagaagattcttgctcacctcgaagacctcaaattaagccgcgaattgtcccgtgtacgcaccgatttgccgctcgaagttgatttcggtcgccgccgcgaacctgactgggagggtcttaaagcgtttttagagcgtcttgaatttggttcgctcttgcatgaattcggccttttagaaagcccgttactggccgaagaagcaccttggccaccgcccgagggcgcgtttttaggttaccgtttgagtcgcccggaaccgatgtgggccgaattactggctcttgcagcgtctgcccagggacgtgtgtatcgcgcggaagaccctcatggtgcgctccgcggcctcttcgaagtccgtggactccttgccaaagacttagctgttgttgcattgcgcgaaggtcttgatttacctccgactgatgatccaatgcttcttgcgtacctcttggacccgtcaaacacgacgcccgaaggcgtagcccgtcgttacggcggcgagtggaccgaagatgcagcgaaacgcgcgttattggccgaacgtttgcacgaaaatttattaggacgtttgcaaggcgaggaacgtctcctctggctttacgaagaagtggagaaaccattgagtcgcgtgctcgcgcatatggaagctaccggtgtcaaattagacgtggcgtatttggagaatctcagccttgaagttgctgcccacatgcgccgcttggaggaagaagtattccgtttagcaggccgttcctttcgccttaactctcgcgatcagttagaacgtgtgttgttcgatgaacttggtctccctcctatcggcaagacagagaagaccggtaaacgtagcacttcagcggcggttttagaagctcttcgcgaagtccatcccattgtggacaagatcttgcagtaccgcgaaatggcgaaattgaaaggcacctatattgaccgtcttccggcattagtccacccgaaaacgggacgcctccatacccgcttcaaccaaacagccacggcgaccggtcgtttgtcctcctctgatccaaaccttcagaatattccagtacgtaccccattgggccagaagatccgccgtgcgtttgtagctgaggagggttggcgtttagtggccctcgattatcgtcaaattgaattacgtgtccttgcccatctttctggcgatgagaacctcatccgcgtgtttcaggaaggcaaagacattcacactcaaacggcaagctggatgtttggattatcagctgaagcgatcgatcctttgatgcgtcgtgcagcgaagaccatcaatttcggtgttctctacggtatgagtgcctttcgtttgtcgcaggaattaggcattccctatgaagaagctcaggcgttcattcagaaatactttcaaagctatcccaaagttaaagcatggatcgagaagactctccgtgaaggccgcacacgtggttacgtagagaccttatttggacgtcgccgctatgttcccgatttaaacgctcgcgtgaaaggcaagcgtgaagccgccgaacgcatggcgttcaacatgcctgtacagggcacggcagctgacctcatgaaacttgcaatggtgcgcctttttccacaattgcgtgaagttggtgcccgcatgctcttgcaggtccacgatgaactcttgttagaagcgccaaaagagcgtgcggaagaggtggcagccctcgcgaaagaagttatggaaggcgtgtggcccttagcggtgcctcttgaagtcgaagttggtattggcgaggatctgctggctgccaaagga

SEQ ID NO: 6536 - protein, 841 aa, synthetic construct
  REGION 1..841: note = Variant of DNA polymerase I from Thermus sp. strain 2.9
MHHHHHHGGSGVLPVFEPKGRVLLVDGHHLAYRNFFALKGLTTSLGEPVQGVYGFAKSLLKALKEDGDVVIVVFDAKAPSFRHEAYEAYKAGRAPTPEDFPRQLALMKELVDLLGLERLEVPGFEADDVLATLAKKAEREGYEVQILTADRDLFQLLSPRISVLHPEGHRITPEWLWEKYGLRPEQWVDFRALAGDPSDNIPGVKGIGEKTALKLLKEWGSLENLLKNLDQVKPESVREKILAHLEDLKLSRELSRVRTDLPLEVDFGRRREPDWEGLKAFLERLEFGSLLHEFGLLESPLLAEEAPWPPPEGAFLGYRLSRPEPMWAELLALAASAQGRVYRAEDPHGALRGLFEVRGLLAKDLAVVALREGLDLPPTDDPMLLAYLLDPSNTTPEGVARRYGGEWTEDAAKRALLAERLHENLLGRLQGEERLLWLYEEVEKPLSRVLAHMEATGVKLDVAYLENLSLEVAAHMRRLEEEVFRLAGRSFRLNSRDQLERVLFDELGLPPIGKTEKTGKRSTSAAVLEALREVHPIVDKILQYREMAKLKGTYIDRLPALVHPKTGRLHTRFNQTATATGRLSSSDPNLQNIPVRTPLGQKIRRAFVAEEGWRLVALDYRQIELRVLAHLSGDENLIRVFQEGKDIHTQTASWMFGLSAEAIDPLMRRAAKTINFGVLYGMSAFRLSQELGIPYEEAQAFIQKYFQSYPKVKAWIEKTLREGRTRGYVETLFGRRRYVPDLNARVKGKREAAERMAFNMPVQGTAADLMKLAMVRLFPQLREVGARMLLQVHDELLLEAPKERAEEVAALAKEVMEGVWPLAVPLEVEVGIGEDLLAAKG

SEQ ID NO: 6537 - DNA, 2523 bp, synthetic construct
  misc_feature 1..2523: note = Variant of DNA polymerase I from Thermus sp. strain 2.9
  source 1..2523: mol_type = other DNA
atgcaccatcatcatcatcatggcggtagcggcgtgttaccggtgttcgagcctaaaggtcgcgtgcttctggttgatggccatcatctcgcgtatcgtaacttctttgccctgaaaggattaaccaccagcctgggcgagccggtacagggtgtctacggctttgcaaagtcgctcctgaaagctctgaaagaagacggtgatgtggtgattgttgtctttgatgcgaaagcgccaagttttcgccacgaagcgtacgaagcttacaaagccgggcgtgctccaacgccggaagactttcctcgccaattggcgcttatgaaggaattagtggatttgcttggcctcgaacgcttggaagttcccggtttcgaggcagacgacgtattagcgactctcgcaaagaaagccgaacgtgagggctatgaagtccagatcttgacagcagatcgcgatcttttccagcttttatctccgcgcatctcggtgttacacccggaagggcatcgtatcaccccggaatggctctgggagaaatatggtttgcgtcccgaacaatgggtggattttcgcgccttagcaggcgatccgagcgacaatattccgggagttaaaggtatcggcgagaagacggcgctcaagctccttaaagaatgggggtcgttggagaacttgcttaagaatttagatcaggtcaaaccagagtcagtgcgtgagaagattcttgctcacctcgaagacctcaaattaagccgcgaattgtcccgtgtacgcaccgatttgccgctcgaagttgatttcggtcgccgccgcgaacctgactgggagggtcttaaagcgtttttagagcgtcttgaatttggttcgctcttgcatgaattcggccttttagaaagcccgttactggccgaagaagcaccttggccaccgcccgagggcgcgtttttaggttaccgtttgagtcgcccggaaccgatgtgggccgaattactggctcttgcagcgtctgcccagggacgtgtgtatcgcgcggaagaccctcatggtgcgctccgcggcctcttcgaagtccgtaccctccttgccaaagacttagctgttgttgcattgcgcgaaggtcttgatttacctccgactgatgatccaatgcttcttgcgtacctcttggacccgtcaaacacgacgcccgaaggcgtagcccgtcgttacggcggcgagtggtgggaagatgcaggcaaacgcgcgttattggccgaacgtttgcacgaaaatttattaggacgtttgcaaggcgaggaacgtctcctctggctttacgaagaagtggagaaaccattgagtcgcgtgctcgcgcatatggaagctaccggtgtcaaattagacgtggcgtatttggagaatctcagccttgaagttgctgcccacatgcgccgcttggaggaagaagtattccgtttagcaggccgttcctttcgccttaactctcgcgatcagttagaacgtgtgttgttcgatgaacttggtctccctcctatcggcaagacagagaagaccggtaaacgtagcacttcagcggcggttttagaagctcttcgcgaagtccatcccattgtggacaagatcttgcagtaccgcgaaatggcgaaattgaaaggcacctatattgaccgtcttccggcattagtccacccgaaaacgggacgcctccatacccgcttcaaccaaacagccacggcgaccggtcgtttgtcctcctctgatccaaaccttcagaatattccagtacgtaccccattgggccagaagatccgccgtgcgtttgtagctgagaagggttggcgtttagtggccctcgattatcgtcaaattgaattacgtgtccttgcccatctttctggcgatgagaacctcatccgcgtgtttcaggaaggcaaagacattcacactcaaacggcaagctggatgtttggattatcagctgaagcgatcgatcctttgatgcgtcgtgcagcgaagaccatcaatttcggtgttctctacggtatgagtgcctttcgtttgtcgcaggaattaggcattccctatgaagaagctcaggctttcattcagaaatactttcaaagctatcccaaagttaaagcatggatcgagaagactctccgtgaaggccgcacacgtggttacgtagagaccttatttggacgtcgccgctatgttcccgatttaaactcgcgcgtgaaaggcaagcgtgaagccgccgaacgcatggcgttcaacatgcctgtacagggcacggcagctgacctcatgaaacttgcaatggtgcgcctttttccacaattgcgtgaagttggtgcccgcatggatttgcaggtccacgatgaactcttgttagaagcgccaaaagagcgtgcggaagaggtggcagccctcgcgaaagaagttatggaaggcgtgtggcccttagcggtgcctcttgaagtcgaagttggtattggcgaggattggctggctgccaaagga

SEQ ID NO: 6538 - protein, 841 aa, synthetic construct
  REGION 1..841: note = Variant of DNA polymerase I from Thermus sp. strain 2.9
MHHHHHHGGSGVLPVFEPKGRVLLVDGHHLAYRNFFALKGLTTSLGEPVQGVYGFAKSLLKALKEDGDVVIVVFDAKAPSFRHEAYEAYKAGRAPTPEDFPRQLALMKELVDLLGLERLEVPGFEADDVLATLAKKAEREGYEVQILTADRDLFQLLSPRISVLHPEGHRITPEWLWEKYGLRPEQWVDFRALAGDPSDNIPGVKGIGEKTALKLLKEWGSLENLLKNLDQVKPESVREKILAHLEDLKLSRELSRVRTDLPLEVDFGRRREPDWEGLKAFLERLEFGSLLHEFGLLESPLLAEEAPWPPPEGAFLGYRLSRPEPMWAELLALAASAQGRVYRAEDPHGALRGLFEVRTLLAKDLAVVALREGLDLPPTDDPMLLAYLLDPSNTTPEGVARRYGGEWWEDAGKRALLAERLHENLLGRLQGEERLLWLYEEVEKPLSRVLAHMEATGVKLDVAYLENLSLEVAAHMRRLEEEVFRLAGRSFRLNSRDQLERVLFDELGLPPIGKTEKTGKRSTSAAVLEALREVHPIVDKILQYREMAKLKGTYIDRLPALVHPKTGRLHTRFNQTATATGRLSSSDPNLQNIPVRTPLGQKIRRAFVAEKGWRLVALDYRQIELRVLAHLSGDENLIRVFQEGKDIHTQTASWMFGLSAEAIDPLMRRAAKTINFGVLYGMSAFRLSQELGIPYEEAQAFIQKYFQSYPKVKAWIEKTLREGRTRGYVETLFGRRRYVPDLNSRVKGKREAAERMAFNMPVQGTAADLMKLAMVRLFPQLREVGARMDLQVHDELLLEAPKERAEEVAALAKEVMEGVWPLAVPLEVEVGIGEDWLAAKG

SEQ ID NO: 6539 - DNA, 2523 bp, synthetic construct
  misc_feature 1..2523: note = Variant of DNA polymerase I from Thermus sp. strain 2.9
  source 1..2523: mol_type = other DNA
atgcaccatcatcatcatcatggcggtagcggcgtgttaccggtgttcgagcctaaaggtcgcgtgcttctggttgatggccatcatctcgcgtatcgtaacttctttgccctgaaaggattaaccaccagcctgggcgagccggtacagggtgtctacggctttgcaaagtcgctcctgaaagctctgaaagaagacggtgatgtggtgattgttgtctttgatgcgaaagcgccaagttttcgccacgaagcgtacgaagcttacaaagccgggcgtgctccaacgccggaagactttcctcgccaattggcgcttatgaaggaattagtggatttgcttggcctcgaacgcttggaagttcccggtttcgaggcagacgacgtattagcgactctcgcaaagaaagccgaacgtgagggctatgaagtccagatcttgacagcagatcgcgatcttttccagcttttatctccgcgcatctcggtgttacacccggaagggcatcgtatcaccccggaatggctctgggagaaatatggtttgcgtcccgaacaatgggtggattttcgcgccttagcaggcgatccgagcgacaatattccgggagttaaaggtatcggcgagaagacggcgctcaagctccttaaagaatgggggtcgttggagaacttgcttaagaatttagatcaggtcaaaccagagtcagtgcgtgagaagattcttgctcacctcgaagacctcaaattaagccgcgaattgtcccgtgtacgcaccgatttgccgctcgaagttgatttcggtcgccgccgcgaacctgactgggagggtcttaaagcgtttttagagcgtcttgaatttggttcgctcttgcatgaattcggccttttagaaagcccgttactggccgaagaagcaccttggccaccgcccgagggcgcgtttttaggttaccgtttgagtcgcccggaaccgatgtgggccgaattactggctcttgcagcgtctgcccagggacgtgtgtatcgcgcggaagaccctcatggtgcgctccgcggcctcttcgaagtccgtaccctccttgccaaagacttagctgttgttgcattgcgcgaaggtcttgatttacctccgactgatgatccaatgcttcttgcgtacctcttggacccgtcaaacacgacgcccgaaggcgtagcccgtcgttacggcggcgagtggaccgaagatgcagcgaaacgcgcgttattggccgaacgtttgcacgaaaatttattaggacgtttgcaaggcgaggaacgtctcctgtggctttacgaagaagtggagaaaccattgagtcgcgtgctcgcgcatatggaagctaccggtgtcaaattagacgtggcgtatttggagaatctcctgcttgaagttgctgcccacatgcgccgcttggaggaagaagtattccgtttagcaggccgttcctttcgccttaactctcgcgatcagttagaacgtgtgttgttcgatgaacttggtctccctcctatcggcaagacagagaagaccggtaaacgtagcacttcagcggcggttttagaagctcttcgcgaagtccatcccattgtggacaagatcttgcagtaccgcgaaatggcgaaattgaaaggcacctatattgaccgtcttccggcattagtccacccgaaaacgggacgcctccatacccgcttcaaccaaacagccacggcgaccggtcgtttgtcctcctctgatccaaaccttcagaatattccagtacgtaccccattgggccagaagatccgccgtgcgtttgtagctgagccgggttgggcgttagtggccctcgattatcgtcaaattgaattacgtgtccttgcccatctttctggcgatgagaacctcatccgcgtgtttcaggaaggcaaagacattcacactcaaacggcaagctggatgtttggattatcagctgaagcgatcgatcctttgatgcgtcgtgcagcgaagaccatcaatttcggtgttctctacggtatgagtgcctttcgtttgtcgcaggaattaggcattccctatgaagaagctcaggcgttcattcagaaatactttcaaagctatcccaaagttaaagcatggatcgagaagactctccgtgaaggccgcacacgtggttacgtagagaccttatttggacgtcgccgctatgttcccgatttaaacgctcgcgtgaaaggcaagcgtgaagccgccgaacgcatggcgttcaacatgcctgtacagggcacggcagctgacctcatgaaacttgcaatggtgcgcctttttccacaattgcgtgaagttggtgcccgcatgctgttgcaggtccacgatgaactcttgttagaagcgccaaaagagcgtgcggaagaggtggcagccctcgcgaaagaagttatggaaggcgtgtggcccttagcggtgcctcttgaagtcgaagttggtattggcgaggattggctggctgccaaagga

SEQ ID NO: 6540 - protein, 841 aa, synthetic construct
  REGION 1..841: note = Variant of DNA polymerase I from Thermus sp. strain 2.9
MHHHHHHGGSGVLPVFEPKGRVLLVDGHHLAYRNFFALKGLTTSLGEPVQGVYGFAKSLLKALKEDGDVVIVVFDAKAPSFRHEAYEAYKAGRAPTPEDFPRQLALMKELVDLLGLERLEVPGFEADDVLATLAKKAEREGYEVQILTADRDLFQLLSPRISVLHPEGHRITPEWLWEKYGLRPEQWVDFRALAGDPSDNIPGVKGIGEKTALKLLKEWGSLENLLKNLDQVKPESVREKILAHLEDLKLSRELSRVRTDLPLEVDFGRRREPDWEGLKAFLERLEFGSLLHEFGLLESPLLAEEAPWPPPEGAFLGYRLSRPEPMWAELLALAASAQGRVYRAEDPHGALRGLFEVRTLLAKDLAVVALREGLDLPPTDDPMLLAYLLDPSNTTPEGVARRYGGEWTEDAAKRALLAERLHENLLGRLQGEERLLWLYEEVEKPLSRVLAHMEATGVKLDVAYLENLLLEVAAHMRRLEEEVFRLAGRSFRLNSRDQLERVLFDELGLPPIGKTEKTGKRSTSAAVLEALREVHPIVDKILQYREMAKLKGTYIDRLPALVHPKTGRLHTRFNQTATATGRLSSSDPNLQNIPVRTPLGQKIRRAFVAEPGWALVALDYRQIELRVLAHLSGDENLIRVFQEGKDIHTQTASWMFGLSAEAIDPLMRRAAKTINFGVLYGMSAFRLSQELGIPYEEAQAFIQKYFQSYPKVKAWIEKTLREGRTRGYVETLFGRRRYVPDLNARVKGKREAAERMAFNMPVQGTAADLMKLAMVRLFPQLREVGARMLLQVHDELLLEAPKERAEEVAALAKEVMEGVWPLAVPLEVEVGIGEDWLAAKG

SEQ ID NO: 6541 - DNA, 2523 bp, synthetic construct
  misc_feature 1..2523: note = Variant of DNA polymerase I from Thermus sp. strain 2.9
  source 1..2523: mol_type = other DNA
atgcaccatcatcatcatcatggcggtagcggcgtgttaccggtgttcgagcctaaaggtcgcgtgcttctggttgatggccatcatctcgcgtatcgtaacttctttgccctgaaaggattaaccaccagcctgggcgagccggtacagggtgtctacggctttgcaaagtcgctcctgaaagctctgaaagaagacggtgatgtggtgattgttgtctttgatgcgaaagcgccaagttttcgccacgaagcgtacgaagcttacaaagccgggcgtgctccaacgccggaagactttcctcgccaattggcgcttatgaaggaattagtggatttgcttggcctcgaacgcttggaagttcccggtttcgaggcagacgacgtattagcgactctcgcaaagaaagccgaacgtgagggctatgaagtccagatcttgacagcagatcgcgatcttttccagcttttatctccgcgcatctcggtgttacacccggaagggcatcgtatcaccccggaatggctctgggagaaatatggtttgcgtcccgaacaatgggtggattttcgcgccttagcaggcgatccgagcgacaatattccgggagttaaaggtatcggcgagaagacggcgctcaagctccttaaagaatgggggtcgttggagaacttgcttaagaatttagatcaggtcaaaccagagtcagtgcgtgagaagattcttgctcacctcgaagacctcaaattaagccgcgaattgtcccgtgtacgcaccgatttgccgctcgaagttgatttcggtcgccgccgcgaacctgactgggagggtcttaaagcgtttttagagcgtcttgaatttggttcgctcttgcatgaattcggccttttagaaagcccgttactggccgaagaagcaccttggccaccgcccgagggcgcgtttttaggttaccgtttgagtcgcccggaaccgatgtgggccgaattactggctcttgcagcgtctgcccagggacgtgtgtatcgcgcggaagaccctcatggtgcgctccgcggcctcttcgaagtccgtaccctccttgccaaagacttagctgttgttgcattgcgcgaaggtcttgatttacctccgactgatgatccaatgcttcttgcgtacctcttggacccgtcaaacacgacgcccgaaggcgtagcccgtcgttacggcggcgagtggaccgaagatgcagcgaaacgcgcgttattggccgaacgtttgcacgaaaatttattaggacgtttgcaaggcgaggaacgtctcctctggctttacgaagaagtggagaaaccattgagtcgcgtgctcgcgcatatggaagctaccggtgtcaaattagacgtggcgtatttggagaatctcagccttgaagttgctgcccacatgcgccgcttggaggaagaagtattccgtttagcaggccgttcctttcgccttaactctcgcgatcagttagaacgtgtgttgttcgatgaacttggtctccctcctatcggcaagacagagaagaccggtaaacgtagcacttcagcggcggttttagaagctcttcgcgaagtccatcccattgtggacaagatcttgcagtaccgcgaaatggcgaaattgaaaggcacctatattgaccgtcttccggcattagtccacccgaaaacgggacgcctccatacccgcttcaaccaaacagccacggcgaccggtcgtttgtcctcctctgatccaaaccttcagaatattccagtacgtacctttttgggccagaagatccgccgtgcgtttgtagctgaggagggttggcgtttagtggccctcgattatcgtcaaattgaattacgtgtccttgcccatctttctggcgatgagaacctcatccgcgtgtttcaggaaggcaaagacattcacactcaaacggcaagctggatgtttggattatcagctgaagcgatcgatcctttgatgcgtcgtgcagcgaagaccatcaatttcggtgttctctacggtatgagtgcctttcgtttgtcgcaggaattaggcattccctatgaagaagctcaggctttcattcagaaatactttcaaagctatcccaaagttaaagcatggatcgagaagactctccgtgaaggccgcacacgtggttacgtagagaccttatttggacgtcgccgctatgttcccgatttaaactcgcgcgtgaaaggcaagcgtgaagccgccgaacgcatggcgttcaacatgcctgtacagggcacggcagctgacctcatgaaacttgcaatggtgcgcctttttccacaattgcgtgaagttggtgcccgcatggatttgcaggtccacgatgaactcttgttagaagcgccaaaagagcgtgcggaagaggtggcagccctcgcgaaagaagttatggaaggcgtgtggcccttagcggtgcctcttgaagtcgaagttggtattggcgaggattggctggctgccaaagga

SEQ ID NO: 6542 - protein, 841 aa, synthetic construct
  REGION 1..841: note = Variant of DNA polymerase I from Thermus sp. strain 2.9
MHHHHHHGGSGVLPVFEPKGRVLLVDGHHLAYRNFFALKGLTTSLGEPVQGVYGFAKSLLKALKEDGDVVIVVFDAKAPSFRHEAYEAYKAGRAPTPEDFPRQLALMKELVDLLGLERLEVPGFEADDVLATLAKKAEREGYEVQILTADRDLFQLLSPRISVLHPEGHRITPEWLWEKYGLRPEQWVDFRALAGDPSDNIPGVKGIGEKTALKLLKEWGSLENLLKNLDQVKPESVREKILAHLEDLKLSRELSRVRTDLPLEVDFGRRREPDWEGLKAFLERLEFGSLLHEFGLLESPLLAEEAPWPPPEGAFLGYRLSRPEPMWAELLALAASAQGRVYRAEDPHGALRGLFEVRTLLAKDLAVVALREGLDLPPTDDPMLLAYLLDPSNTTPEGVARRYGGEWTEDAAKRALLAERLHENLLGRLQGEERLLWLYEEVEKPLSRVLAHMEATGVKLDVAYLENLSLEVAAHMRRLEEEVFRLAGRSFRLNSRDQLERVLFDELGLPPIGKTEKTGKRSTSAAVLEALREVHPIVDKILQYREMAKLKGTYIDRLPALVHPKTGRLHTRFNQTATATGRLSSSDPNLQNIPVRTFLGQKIRRAFVAEEGWRLVALDYRQIELRVLAHLSGDENLIRVFQEGKDIHTQTASWMFGLSAEAIDPLMRRAAKTINFGVLYGMSAFRLSQELGIPYEEAQAFIQKYFQSYPKVKAWIEKTLREGRTRGYVETLFGRRRYVPDLNSRVKGKREAAERMAFNMPVQGTAADLMKLAMVRLFPQLREVGARMDLQVHDELLLEAPKERAEEVAALAKEVMEGVWPLAVPLEVEVGIGEDWLAAKG

SEQ ID NO: 6543 - DNA, 2523 bp, synthetic construct
  misc_feature 1..2523: note = Variant of DNA polymerase I from Thermus sp. strain 2.9
  source 1..2523: mol_type = other DNA
atgcaccatcatcatcatcatggcggtagcggcgtgttaccggtgttcgagcctaaaggtcgcgtgcttctggttgatggccatcatctcgcgtatcgtaacttctttgccctgaaaggattaaccaccagcctgggcgagccggtacagggtgtctacggctttgcaaagtcgctcctgaaagctctgaaagaagacggtgatgtggtgattgttgtctttgatgcgaaagcgccaagttttcgccacgaagcgtacgaagcttacaaagccgggcgtgctccaacgccggaagactttcctcgccaattggcgcttatgaaggaattagtggatttgcttggcctcgaacgcttggaagttcccggtttcgaggcagacgacgtattagcgactctcgcaaagaaagccgaacgtgagggctatgaagtccagatcttgacagcagatcgcgatcttttccagcttttatctccgcgcatctcggtgttacacccggaagggcatcgtatcaccccggaatggctctgggagaaatatggtttgcgtcccgaacaatgggtggattttcgcgccttagcaggcgatccgagcgacaatattccgggagttaaaggtatcggcgagaagacggcgctcaagctccttaaagaatgggggtcgttggagaacttgcttaagaatttagatcaggtcaaaccagagtcagtgcgtgagaagattcttgctcacctcgaagacctcaaattaagccgcgaattgtcccgtgtacgcaccgatttgccgctcgaagttgatttcggtcgccgccgcgaacctgactgggagggtcttaaagcgtttttagagcgtcttgaatttggttcgctcttgcatgaattcggccttttagaaagcccgttactggccgaagaagcaccttggccaccgcccgagggcgcgtttttaggttaccgtttgagtcgcccggaaccgatgtgggccgaattactggctcttgcagcgtctgcccagggacgtgtgtatcgcgcggaagaccctcatggtgcgctccgcggcctcttcgaagtccgtaccctccttgccaaagacttagctgttgttgcattgcgcgaaggtcttgatttacctccgactgatgatccaatgcttcttgcgtacctcttggacccgtcaaacacgacgcccgaaggcgtagcccgtcgttacggcggcgagtggaccgaagatgcagccaaacgcgcgttattggccgaacgtttgcacgaaaatttattaggacgtttgcaaggcgaggcgcgtctcctgtggctttacgaagaagtggagaaaccattgagtcgcgtgctcgcgcatatggaagctaccggtgtcaaattagacgtggcgtatttggagaatctcagccttgaagttgctgcccacatgcgccgcttggaggaagaagtattccgtttagcaggccgttcctttcgccttaactctcgcgatcagttagaacgtgtgttgttcgatgaacttggtctccctcctatcggcaagacagagaagaccggtaaacgtagcacttcagcggcggttttagaagctcttcgcgaagtccatcccattgtggacaagatcttgcagtaccgcgaaatggcgaaattgaaaggcacctatattgaccgtcttccggcattagtccacccgaaaacgggacgcctccatacccgcttcaaccaaacagccacggcgaccggtcgtttgtcctcctctgatccaaaccttcagaatattccagtacgtaccccattgggccagaagatccgccgtgcgtttgtagctgagccgggttggcgtttagtggccctcgattatcgtcaaattgaattacgtgtccttgcccatctttctggcgatgagaacctcatccgcgtgtttcaggaaggcaaagacattcacactcaaacggcaagctggatgtttggattatcagctgaagcgatcgatcctttgatgcgtcgtgcagcgaagaccatcaatttcggtgttctctacggtatgagtgcctttcgtttgtcgcaggaattaggcattcccctggaagaagctcagggtttcattcagaaatactttcaaagctatcccaaagttaaagcatggatcgagaagactctccgtgaaggccgcacacgtggttacgtagagaccttatttggacgtcgccgctatgttcccgatttaaacgctcgcgtgaaaggcaagcgtgaagccgccgaacgcatggcgttcaacatgcctgtacagggcacggcagctgacctcatgaaacttgcaatggtgcgcctttttccacaattgcgtgaagttggtgcccgcatggatttgcaggtccacgatgaactcttgttagaagcgccaaaagagcgtgcggaagaggtggcagccctcgcgaaagaagttatggaaggcgtgtggcccttagcggtgcctcttgaagtcgaagttggtattggcgaggattggctggctgccaaagga

SEQ ID NO: 6544 - protein, 841 aa, synthetic construct
  REGION 1..841: note = Variant of DNA polymerase I from Thermus sp. strain 2.9
MHHHHHHGGSGVLPVFEPKGRVLLVDGHHLAYRNFFALKGLTTSLGEPVQGVYGFAKSLLKALKEDGDVVIVVFDAKAPSFRHEAYEAYKAGRAPTPEDFPRQLALMKELVDLLGLERLEVPGFEADDVLATLAKKAEREGYEVQILTADRDLFQLLSPRISVLHPEGHRITPEWLWEKYGLRPEQWVDFRALAGDPSDNIPGVKGIGEKTALKLLKEWGSLENLLKNLDQVKPESVREKILAHLEDLKLSRELSRVRTDLPLEVDFGRRREPDWEGLKAFLERLEFGSLLHEFGLLESPLLAEEAPWPPPEGAFLGYRLSRPEPMWAELLALAASAQGRVYRAEDPHGALRGLFEVRTLLAKDLAVVALREGLDLPPTDDPMLLAYLLDPSNTTPEGVARRYGGEWTEDAAKRALLAERLHENLLGRLQGEARLLWLYEEVEKPLSRVLAHMEATGVKLDVAYLENLSLEVAAHMRRLEEEVFRLAGRSFRLNSRDQLERVLFDELGLPPIGKTEKTGKRSTSAAVLEALREVHPIVDKILQYREMAKLKGTYIDRLPALVHPKTGRLHTRFNQTATATGRLSSSDPNLQNIPVRTPLGQKIRRAFVAEPGWRLVALDYRQIELRVLAHLSGDENLIRVFQEGKDIHTQTASWMFGLSAEAIDPLMRRAAKTINFGVLYGMSAFRLSQELGIPLEEAQGFIQKYFQSYPKVKAWIEKTLREGRTRGYVETLFGRRRYVPDLNARVKGKREAAERMAFNMPVQGTAADLMKLAMVRLFPQLREVGARMDLQVHDELLLEAPKERAEEVAALAKEVMEGVWPLAVPLEVEVGIGEDWLAAKG

SEQ ID NO: 6545 - DNA, 2523 bp, synthetic construct
  misc_feature 1..2523: note = Variant of DNA polymerase I from Thermus sp. strain 2.9
  source 1..2523: mol_type = other DNA
atgcaccatcatcatcatcatggcggtagcggcgtgttaccggtgttcgagcctaaaggtcgcgtgcttctggttgatggccatcatctcgcgtatcgtaacttctttgccctgaaaggattaaccaccagcctgggcgagccggtacagggtgtctacggctttgcaaagtcgctcctgaaagctctgaaagaagacggtgatgtggtgattgttgtctttgatgcgaaagcgccaagttttcgccacgaagcgtacgaagcttacaaagccgggcgtgctccaacgccggaagactttcctcgccaattggcgcttatgaaggaattagtggatttgcttggcctcgaacgcttggaagttcccggtttcgaggcagacgacgtattagcgactctcgcaaagaaagccgaacgtgagggctatgaagtccagatcttgacagcagatcgcgatcttttccagcttttatctccgcgcatctcggtgttacacccggaagggcatcgtatcaccccggaatggctctgggagaaatatggtttgcgtcccgaacaatgggtggattttcgcgccttagcaggcgatccgagcgacaatattccgggagttaaaggtatcggcgagaagacggcgctcaagctccttaaagaatgggggtcgttggagaacttgcttaagaatttagatcaggtcaaaccagagtcagtgcgtgagaagattcttgctcacctcgaagacctcaaattaagccgcgaattgtcccgtgtacgcaccgatttgccgctcgaagttgatttcggtcgccgccgcgaacctgactgggagggtcttaaagcgtttttagagcgtcttgaatttggttcgctcttgcatgaattcggccttttagaaagcccgttactggccgaagaagcaccttggccaccgcccgagggcgcgtttttaggttaccgtttgagtcgcccggaaccgatgtgggccgaattactggctcttgcagcgtctgcccagggacgtgtgtatcgcgcggaagaccctcatggtgcgctccgcggcctcttcgaagtccgtggcctccttgccaaagacttagctgttgttgcattgcgcgaaggtcttgatttacctccgactgatgatccaatgcttcttgcgtacctcttggacccgtcaaacacgacgcccgaaggcgtagcccgtcgttacggcggcgagtggaccgaagatgcagccaaacgcgcgttattggccgaacgtttgcacgaaaatttattaggacgtttgcaaggcgaggagcgtctccgttggctttacgaagaagtggagaaaccattgagtcgcgtgctcgcgcatatggaagctaccggtgtcaaattagacgtggcgtatttggagaatctcagccttgaagttgctgcccacatgcgccgcttggaggaagaagtattccgtttagcaggccgttcctttcgccttaactctcgcgatcagttagaacgtgtgttgttcgatgaacttggtctccctcctatcggcaagacagagaagaccggtaaacgtagcacttcagcggcggttttagaagctcttcgcgaagtccatcccattgtggacaagatcttgcagtaccgcgaaatggcgaaattgaaaggcacctatattgaccgtcttccggcattagtccacccgaaaacgggacgcctccatacccgcttcaaccaaacagccacggcgaccggtcgtttgtcctcctctgatccaaaccttcagaatattccagtacgtacctttttgggccagaagatccgccgtgcgtttgtagctgaggagggttgggcgttagtggccctcgattatcgtcaaattgaattacgtgtccttgcccatctttctggcgatgagaacctcatccgcgtgtttcaggaaggcaaagacattcacactcaaacggcaagctggatgtttggattatcagctgaagcgatcgatcctttgatgcgtcgtgcagcgaagaccatcaatttcggtgttctctacggtatgagtgcctttcgtttgtcgcaggaattaggcattccctatgaagaagctcaggcgttcattcagaaatactttcaaagctatcccaaagttaaagcatggatcgagaagactctccgtgaaggccgcacacgtggttacgtagagaccttatttggacgtcgccgctatgttcccgatttaaacgctcgcgtgaaaggcaagcgtgaagccgccgaacgcatggcgttcaacatgcctgtacagggcacggcagctgacctcatgaaacttgcaatggtgcgcctttttccacaattgcgtgaagttggtgcccgcatgctcttgcaggtccacgatgaactcttgttagaagcgccaaaagagcgtgcggaagaggtggcagccctcgcgaaagaagttatggaaggcgtgtggcccttagcggtgcctcttgaagtcgaagttggtattggcgaggattggctggctgccaaagga

SEQ ID NO: 6546 - protein, 841 aa, synthetic construct
  REGION 1..841: note = Variant of DNA polymerase I from Thermus sp. strain 2.9
MHHHHHHGGSGVLPVFEPKGRVLLVDGHHLAYRNFFALKGLTTSLGEPVQGVYGFAKSLLKALKEDGDVVIVVFDAKAPSFRHEAYEAYKAGRAPTPEDFPRQLALMKELVDLLGLERLEVPGFEADDVLATLAKKAEREGYEVQILTADRDLFQLLSPRISVLHPEGHRITPEWLWEKYGLRPEQWVDFRALAGDPSDNIPGVKGIGEKTALKLLKEWGSLENLLKNLDQVKPESVREKILAHLEDLKLSRELSRVRTDLPLEVDFGRRREPDWEGLKAFLERLEFGSLLHEFGLLESPLLAEEAPWPPPEGAFLGYRLSRPEPMWAELLALAASAQGRVYRAEDPHGALRGLFEVRGLLAKDLAVVALREGLDLPPTDDPMLLAYLLDPSNTTPEGVARRYGGEWTEDAAKRALLAERLHENLLGRLQGEERLRWLYEEVEKPLSRVLAHMEATGVKLDVAYLENLSLEVAAHMRRLEEEVFRLAGRSFRLNSRDQLERVLFDELGLPPIGKTEKTGKRSTSAAVLEALREVHPIVDKILQYREMAKLKGTYIDRLPALVHPKTGRLHTRFNQTATATGRLSSSDPNLQNIPVRTFLGQKIRRAFVAEEGWALVALDYRQIELRVLAHLSGDENLIRVFQEGKDIHTQTASWMFGLSAEAIDPLMRRAAKTINFGVLYGMSAFRLSQELGIPYEEAQAFIQKYFQSYPKVKAWIEKTLREGRTRGYVETLFGRRRYVPDLNARVKGKREAAERMAFNMPVQGTAADLMKLAMVRLFPQLREVGARMLLQVHDELLLEAPKERAEEVAALAKEVMEGVWPLAVPLEVEVGIGEDWLAAKG

SEQ ID NO: 6547 - DNA, 2523 bp, synthetic construct
  misc_feature 1..2523: note = Variant of DNA polymerase I from Thermus sp. strain 2.9
  source 1..2523: mol_type = other DNA
atgcaccatcatcatcatcatggcggtagcggcgtgttaccggtgttcgagcctaaaggtcgcgtgcttctggttgatggccatcatctcgcgtatcgtaacttctttgccctgaaaggattaaccaccagcctgggcgagccggtacagggtgtctacggctttgcaaagtcgctcctgaaagctctgaaagaagacggtgatgtggtgattgttgtctttgatgcgaaagcgccaagttttcgccacgaagcgtacgaagcttacaaagccgggcgtgctccaacgccggaagactttcctcgccaattggcgcttatgaaggaattagtggatttgcttggcctcgaacgcttggaagttcccggtttcgaggcagacgacgtattagcgactctcgcaaagaaagccgaacgtgagggctatgaagtccagatcttgacagcagatcgcgatcttttccagcttttatctccgcgcatctcggtgttacacccggaagggcatcgtatcaccccggaatggctctgggagaaatatggtttgcgtcccgaacaatgggtggattttcgcgccttagcaggcgatccgagcgacaatattccgggagttaaaggtatcggcgagaagacggcgctcaagctccttaaagaatgggggtcgttggagaacttgcttaagaatttagatcaggtcaaaccagagtcagtgcgtgagaagattcttgctcacctcgaagacctcaaattaagccgcgaattgtcccgtgtacgcaccgatttgccgctcgaagttgatttcggtcgccgccgcgaacctgactgggagggtcttaaagcgtttttagagcgtcttgaatttggttcgctcttgcatgaattcggccttttagaaagcccgttactggccgaagaagcaccttggccaccgcccgagggcgcgtttttaggttaccgtttgagtcgcccggaaccgatgtgggccgaattactggctcttgcagcgtctgcccagggacgtgtgtatcgcgcggaagaccctcatggtgcgctccgcggcctcttcgaagtccgtggcctccttgccaaagacttagctgttgttgcattgcgcgaaggtcttgatttacctccgactgatgatccaatgcttcttgcgtacctcttggacccgtcaaacacgacgcccgaaggcgtagcccgtcgttacggcggcgagtggtgggaagatgcaggcaaacgcgcgttattggccgaacgtttgcacgaaaatttattaggacgtttgcaaggcgaggagcgtctccgttggctttacgaagaagtggagaaaccattgagtcgcgtgctcgcgcatatggaagctaccggtgtcaaattagacgtggcgtatttggagaatctcagccttgaagttgctgcccacatgcgccgcttggaggaagaagtattccgtttagcaggccgttcctttcgccttaactctcgcgatcagttagaacgtgtgttgttcgatgaacttggtctccctcctatcggcaagacagagaagaccggtaaacgtagcacttcagcggcggttttagaagctcttcgcgaagtccatcccattgtggacaagatcttgcagtaccgcgaaatggcgaaattgaaaggcacctatattgaccgtcttccggcattagtccacccgaaaacgggacgcctccatacccgcttcaaccaaacagccacggcgaccggtcgtttgtcctcctctgatccaaaccttcagaatattccagtacgtaccccattgggccagaagatccgccgtgcgtttgtagctgaggagggttggcgtttagtggccctcgattatcgtcaaattgaattacgtgtccttgcccatctttctggcgatgagaacctcatccgcgtgtttcaggaaggcaaagacattcacactcaaacggcaagctggatgtttggattatcagctgaagcgatcgatcctttgatgcgtcgtgcagcgaagaccatcaatttcggtgttctctacggtatgagtgcctttcgtttgtcgcaggaattaggcattccctatgaagaagctcagggtttcattcagaaatactttcaaagctatcccaaagttaaagcatggatcgagaagactctccgtgaaggccgcacacgtggttacgtagagaccttatttggacgtcgccgctatgttcccgatttaaactcgcgcgtgaaaggcaagcgtgaagccgccgaacgcatggcgttcaacatgcctgtacagggcacggcagctgacctcatgaaacttgcaatggtgcgcctttttccacaattgcgtgaagttggtgcccgcatgctgttgcaggtccacgatgaactcttgttagaagcgccaaaagagcgtgcggaagaggtggcagccctcgcgaaagaagttatggaaggcgtgtggcccttagcggtgcctcttgaagtcgaagttggtattggcgaggattggctggctgccaaagga

SEQ ID NO: 6548 - protein, 841 aa, synthetic construct
  REGION 1..841: note = Variant of DNA polymerase I from Thermus sp. strain 2.9
MHHHHHHGGSGVLPVFEPKGRVLLVDGHHLAYRNFFALKGLTTSLGEPVQGVYGFAKSLLKALKEDGDVVIVVFDAKAPSFRHEAYEAYKAGRAPTPEDFPRQLALMKELVDLLGLERLEVPGFEADDVLATLAKKAEREGYEVQILTADRDLFQLLSPRISVLHPEGHRITPEWLWEKYGLRPEQWVDFRALAGDPSDNIPGVKGIGEKTALKLLKEWGSLENLLKNLDQVKPESVREKILAHLEDLKLSRELSRVRTDLPLEVDFGRRREPDWEGLKAFLERLEFGSLLHEFGLLESPLLAEEAPWPPPEGAFLGYRLSRPEPMWAELLALAASAQGRVYRAEDPHGALRGLFEVRGLLAKDLAVVALREGLDLPPTDDPMLLAYLLDPSNTTPEGVARRYGGEWWEDAGKRALLAERLHENLLGRLQGEERLRWLYEEVEKPLSRVLAHMEATGVKLDVAYLENLSLEVAAHMRRLEEEVFRLAGRSFRLNSRDQLERVLFDELGLPPIGKTEKTGKRSTSAAVLEALREVHPIVDKILQYREMAKLKGTYIDRLPALVHPKTGRLHTRFNQTATATGRLSSSDPNLQNIPVRTPLGQKIRRAFVAEEGWRLVALDYRQIELRVLAHLSGDENLIRVFQEGKDIHTQTASWMFGLSAEAIDPLMRRAAKTINFGVLYGMSAFRLSQELGIPYEEAQGFIQKYFQSYPKVKAWIEKTLREGRTRGYVETLFGRRRYVPDLNSRVKGKREAAERMAFNMPVQGTAADLMKLAMVRLFPQLREVGARMLLQVHDELLLEAPKERAEEVAALAKEVMEGVWPLAVPLEVEVGIGEDWLAAKG

SEQ ID NO: 6549 - DNA, 2523 bp, synthetic construct
  misc_feature 1..2523: note = Variant of DNA polymerase I from Thermus sp. strain 2.9
  source 1..2523: mol_type = other DNA
atgcaccatcatcatcatcatggcggtagcggcgtgttaccggtgttcgagcctaaaggtcgcgtgcttctggttgatggccatcatctcgcgtatcgtaacttctttgccctgaaaggattaaccaccagcctgggcgagccggtacagggtgtctacggctttgcaaagtcgctcctgaaagctctgaaagaagacggtgatgtggtgattgttgtctttgatgcgaaagcgccaagttttcgccacgaagcgtacgaagcttacaaagccgggcgtgctccaacgccggaagactttcctcgccaattggcgcttatgaaggaattagtggatttgcttggcctcgaacgcttggaagttcccggtttcgaggcagacgacgtattagcgactctcgcaaagaaagccgaacgtgagggctatgaagtccagatcttgacagcagatcgcgatcttttccagcttttatctccgcgcatctcggtgttacacccggaagggcatcgtatcaccccggaatggctctgggagaaatatggtttgcgtcccgaacaatgggtggattttcgcgccttagcaggcgatccgagcgacaatattccgggagttaaaggtatcggcgagaagacggcgctcaagctccttaaagaatgggggtcgttggagaacttgcttaagaatttagatcaggtcaaaccagagtcagtgcgtgagaagattcttgctcacctcgaagacctcaaattaagccgcgaattgtcccgtgtacgcaccgatttgccgctcgaagttgatttcggtcgccgccgcgaacctgactgggagggtcttaaagcgtttttagagcgtcttgaatttggttcgctcttgcatgaattcggccttttagaaagcccgttactggccgaagaagcaccttggccaccgcccgagggcgcgtttttaggttaccgtttgagtcgcccggaaccgatgtgggccgaattactggctcttgcagcgtctgcccagggacgtgtgtatcgcgcggaagaccctcatggtgcgctccgcggcctcttcgaagtccgtaccctccttgccaaagacttagctgttgttgcattgcgcgaaggtcttgatttacctccgactgatgatccaatgcttcttgcgtacctcttggacccgtcaaacacgacgcccgaaggcgtagcccgtcgttacggcggcgagtggaccgaagatgcagcgaaacgcgcgttattggccgaacgtttgcacgaaaatttattaggacgtttgcaaggcgaggaacgtctcctctggctttacgaagaagtggagaaaccattgagtcgcgtgctcgcgcatatggaagctaccggtgtcaaattagacgtggcgtatttggagaatctcagccttgaagttgctgcccacatgcgccgcttggaggaagaagtattccgtttagcaggccgttcctttcgccttaactctcgcgatcagttagaacgtgtgttgttcgatgaacttggtctccctcctatcggcaagacagagaagaccggtaaacgtagcacttcagcggcggttttagaagctcttcgcgaagtccatcccattgtggacaagatcttgcagtaccgcgaaatggcgaaattgaaaggcacctatattgaccgtcttccggcattagtccacccgaaaacgggacgcctccatacccgcttcaaccaaacagccacggcgaccggtcgtttgtcctcctctgatccaaaccttcagaatattccagtacgtacctttttgggccagaagatccgccgtgcgtttgtagctgagaagggttgggcgttagtggccctcgattatcgtcaaattgaattacgtgtccttgcccatctttctggcgatgagaacctcatccgcgtgtttcaggaaggcaaagacattcacactcaaacggcaagctggatgtttggattatcagctgaagcgatcgatcctttgatgcgtcgtgcagcgaagaccatcaatttcggtgttctctacggtatgagtgcctttcgtttgtcgcaggaattaggcattccctatgaagaagctcaggcgttcattcagaaatactttcaaagctatcccaaagttaaagcatggatcgagaagactctccgtgaaggccgcacacgtggttacgtagagaccttatttggacgtcgccgctatgttcccgatttaaacgctcgcgtgaaaggcaagcgtgaagccgccgaacgcatggcgttcaacatgcctgtacagggcacggcagctgacctcatgaaacttgcaatggtgcgcctttttccacaattgcgtgaagttggtgcccgcatgctcttgcaggtccacgatgaactcttgttagaagcgccaaaagagcgtgcggaagaggtggcagccctcgcgaaagaagttatggaaggcgtgtggcccttagcggtgcctcttgaagtcgaagttggtattggcgaggattggctggctgccaaagga

SEQ ID NO: 6550 - protein, 841 aa, synthetic construct
  REGION 1..841: note = Variant of DNA polymerase I from Thermus sp. strain 2.9
MHHHHHHGGSGVLPVFEPKGRVLLVDGHHLAYRNFFALKGLTTSLGEPVQGVYGFAKSLLKALKEDGDVVIVVFDAKAPSFRHEAYEAYKAGRAPTPEDFPRQLALMKELVDLLGLERLEVPGFEADDVLATLAKKAEREGYEVQILTADRDLFQLLSPRISVLHPEGHRITPEWLWEKYGLRPEQWVDFRALAGDPSDNIPGVKGIGEKTALKLLKEWGSLENLLKNLDQVKPESVREKILAHLEDLKLSRELSRVRTDLPLEVDFGRRREPDWEGLKAFLERLEFGSLLHEFGLLESPLLAEEAPWPPPEGAFLGYRLSRPEPMWAELLALAASAQGRVYRAEDPHGALRGLFEVRTLLAKDLAVVALREGLDLPPTDDPMLLAYLLDPSNTTPEGVARRYGGEWTEDAAKRALLAERLHENLLGRLQGEERLLWLYEEVEKPLSRVLAHMEATGVKLDVAYLENLSLEVAAHMRRLEEEVFRLAGRSFRLNSRDQLERVLFDELGLPPIGKTEKTGKRSTSAAVLEALREVHPIVDKILQYREMAKLKGTYIDRLPALVHPKTGRLHTRFNQTATATGRLSSSDPNLQNIPVRTFLGQKIRRAFVAEKGWALVALDYRQIELRVLAHLSGDENLIRVFQEGKDIHTQTASWMFGLSAEAIDPLMRRAAKTINFGVLYGMSAFRLSQELGIPYEEAQAFIQKYFQSYPKVKAWIEKTLREGRTRGYVETLFGRRRYVPDLNARVKGKREAAERMAFNMPVQGTAADLMKLAMVRLFPQLREVGARMLLQVHDELLLEAPKERAEEVAALAKEVMEGVWPLAVPLEVEVGIGEDWLAAKG

SEQ ID NO: 6551 - DNA, 2523 bp, synthetic construct
  misc_feature 1..2523: note = Variant of DNA polymerase I from Thermus sp. strain 2.9
  source 1..2523: mol_type = other DNA
atgcaccatcatcatcatcatggcggtagcggcgtgttaccggtgttcgagcctaaaggtcgcgtgcttctggttgatggccatcatctcgcgtatcgtaacttctttgccctgaaaggattaaccaccagcctgggcgagccggtacagggtgtctacggctttgcaaagtcgctcctgaaagctctgaaagaagacggtgatgtggtgattgttgtctttgatgcgaaagcgccaagttttcgccacgaagcgtacgaagcttacaaagccgggcgtgctccaacgccggaagactttcctcgccaattggcgcttatgaaggaattagtggatttgcttggcctcgaacgcttggaagttcccggtttcgaggcagacgacgtattagcgactctcgcaaagaaagccgaacgtgagggctatgaagtccagatcttgacagcagatcgcgatcttttccagcttttatctccgcgcatctcggtgttacacccggaagggcatcgtatcaccccggaatggctctgggagaaatatggtttgcgtcccgaacaatgggtggattttcgcgccttagcaggcgatccgagcgacaatattccgggagttaaaggtatcggcgagaagacggcgctcaagctccttaaagaatgggggtcgttggagaacttgcttaagaatttagatcaggtcaaaccagagtcagtgcgtgagaagattcttgctcacctcgaagacctcaaattaagccgcgaattgtcccgtgtacgcaccgatttgccgctcgaagttgatttcggtcgccgccgcgaacctgactgggagggtcttaaagcgtttttagagcgtcttgaatttggttcgctcttgcatgaattcggccttttagaaagcccgttactggccgaagaagcaccttggccaccgcccgagggcgcgtttttaggttaccgtttgagtcgcccggaaccgatgtgggccgaattactggctcttgcagcgtctgcccagggacgtgtgtatcgcgcggaagaccctcatggtgcgctccgcggcctcttcgaagtccgtaccctccttgccaaagacttagctgttgttgcattgcgcgaaggtcttgatttacctccgactgatgatccaatgcttcttgcgtacctcttggacccgtcaaacacgacgcccgaaggcgtagcccgtcgttacggcggcgagtggaccgaagatgcagccaaacgcgcgttattggccgaacgtttgcacgaaaatttattaggacgtttgcaaggcgaggagcgtctcctgtggctttacgaagaagtggagaaaccattgagtcgcgtgctcgcgcatatggaagctaccggtgtcaaattagacgtggcgtatttggagaatctcagccttgaagttgctgcccacatgcgccgcttggaggaagaagtattccgtttagcaggccgttcctttcgccttaactctcgcgatcagttagaacgtgtgttgttcgatgaacttggtctccctcctatcggcaagacagagaagaccggtaaacgtagcacttcagcggcggttttagaagctcttcgcgaagtccatcccattgtggacaagatcttgcagtaccgcgaaatggcgaaattgaaaggcacctatattgaccgtcttccggcattagtccacccgaaaacgggacgcctccatacccgcttcaaccaaacagccacggcgaccggtcgtttgtcctcctctgatccaaaccttcagaatattccagtacgtaccccattgggccagaagatccgccgtgcgtttgtagctgagaagggttgggcgttagtggccctcgattatcgtcaaattgaattacgtgtccttgcccatctttctggcgatgagaacctcatccgcgtgtttcaggaaggcaaagacattcacactcaaacggcaagctggatgtttggattatcagctgaagcgatcgatcctttgatgcgtcgtgcagcgaagaccatcaatttcggtgttctctacggtatgagtgcctttcgtttgtcgcaggaattaggcattccctatgaagaagctcagggtttcattcagaaatactttcaaggctatcccaaagttaaagcatggatcgagaagactctccgtgaaggccgcacacgtggttacgtagagaccttatttggacgtcgccgctatgttcccgatttaaacgctcgcgtgaaaggcaagcgtgaagccgccgaacgcatggcgttcaacatgcctgtacagggcacggcagctgacctcatgaaacttgcaatggtgcgcctttttccacaattgcgtgaagttggtgcccgcatgctgttgcaggtccacgatgaactcttgttagaagcgccaaaagagcgtgcggaagaggtggcagccctcgcgaaagaagttatggaaggcgtgtggcccttagcggtgcctcttgaagtcgaagttggtattggcgaggattggctggctgccaaagga

SEQ ID NO: 6552 - protein, 841 aa, synthetic construct
  REGION 1..841: note = Variant of DNA polymerase I from Thermus sp. strain 2.9
MHHHHHHGGSGVLPVFEPKGRVLLVDGHHLAYRNFFALKGLTTSLGEPVQGVYGFAKSLLKALKEDGDVVIVVFDAKAPSFRHEAYEAYKAGRAPTPEDFPRQLALMKELVDLLGLERLEVPGFEADDVLATLAKKAEREGYEVQILTADRDLFQLLSPRISVLHPEGHRITPEWLWEKYGLRPEQWVDFRALAGDPSDNIPGVKGIGEKTALKLLKEWGSLENLLKNLDQVKPESVREKILAHLEDLKLSRELSRVRTDLPLEVDFGRRREPDWEGLKAFLERLEFGSLLHEFGLLESPLLAEEAPWPPPEGAFLGYRLSRPEPMWAELLALAASAQGRVYRAEDPHGALRGLFEVRTLLAKDLAVVALREGLDLPPTDDPMLLAYLLDPSNTTPEGVARRYGGEWTEDAAKRALLAERLHENLLGRLQGEERLLWLYEEVEKPLSRVLAHMEATGVKLDVAYLENLSLEVAAHMRRLEEEVFRLAGRSFRLNSRDQLERVLFDELGLPPIGKTEKTGKRSTSAAVLEALREVHPIVDKILQYREMAKLKGTYIDRLPALVHPKTGRLHTRFNQTATATGRLSSSDPNLQNIPVRTPLGQKIRRAFVAEKGWALVALDYRQIELRVLAHLSGDENLIRVFQEGKDIHTQTASWMFGLSAEAIDPLMRRAAKTINFGVLYGMSAFRLSQELGIPYEEAQGFIQKYFQGYPKVKAWIEKTLREGRTRGYVETLFGRRRYVPDLNARVKGKREAAERMAFNMPVQGTAADLMKLAMVRLFPQLREVGARMLLQVHDELLLEAPKERAEEVAALAKEVMEGVWPLAVPLEVEVGIGEDWLAAKG

SEQ ID NO: 6553 - DNA, 2523 bp, synthetic construct
  misc_feature 1..2523: note = Variant of DNA polymerase I from Thermus sp. strain 2.9
  source 1..2523: mol_type = other DNA
atgcaccatcatcatcatcatggcggtagcggcgtgttaccggtgttcgagcctaaaggtcgcgtgcttctggttgatggccatcatctcgcgtatcgtaacttctttgccctgaaaggattaaccaccagcctgggcgagccggtacagggtgtctacggctttgcaaagtcgctcctgaaagctctgaaagaagacggtgatgtggtgattgttgtctttgatgcgaaagcgccaagttttcgccacgaagcgtacgaagcttacaaagccgggcgtgctccaacgccggaagactttcctcgccaattggcgcttatgaaggaattagtggatttgcttggcctcgaacgcttggaagttcccggtttcgaggcagacgacgtattagcgactctcgcaaagaaagccgaacgtgagggctatgaagtccagatcttgacagcagatcgcgatcttttccagcttttatctccgcgcatctcggtgttacacccggaagggcatcgtatcaccccggaatggctctgggagaaatatggtttgcgtcccgaacaatgggtggattttcgcgccttagcaggcgatccgagcgacaatattccgggagttaaaggtatcggcgagaagacggcgctcaagctccttaaagaatgggggtcgttggagaacttgcttaagaatttagatcaggtcaaaccagagtcagtgcgtgagaagattcttgctcacctcgaagacctcaaattaagccgcgaattgtcccgtgtacgcaccgatttgccgctcgaagttgatttcggtcgccgccgcgaacctgactgggagggtcttaaagcgtttttagagcgtcttgaatttggttcgctcttgcatgaattcggccttttagaaagcccgttactggccgaagaagcaccttggccaccgcccgagggcgcgtttttaggttaccgtttgagtcgcccggaaccgatgtgggccgaattactggctcttgcagcgtctgcccagggacgtgtgtatcgcgcggaagaccctcatggtgcgctccgcggcctcttcgaagtccgtggcctccttgccaaagacttagctgttgttgcattgcgcgaaggtcttgatttacctccgactgatgatccaatgcttcttgcgtacctcttggacccgtcaaacacgacgcccgaaggcgtagcccgtcgttacggcggcgagtggaccgaagatgcaggcaaacgcgcgttattggccgaacgtttgcacgaaaatttattaggacgtttgcaaggcgaggaacgtctcctctggctttacgaagaagtggagaaaccattgagtcgcgtgctcgcgcatatggaagctaccggtgtcaaattagacgtggcgtatttggagaatctcagccttgaagttgctgcccacatgcgccgcttggaggaagaagtattccgtttagcaggccgttcctttcgccttaactctcgcgatcagttagaacgtgtgttgttcgatgaacttggtctccctcctatcggcaagacagagaagaccggtaaacgtagcacttcagcggcggttttagaagctcttcgcgaagtccatcccattgtggacaagatcttgcagtaccgcgaaatggcgaaattgaaaggcacctatattgaccgtcttccggcattagtccacccgaaaacgggacgcctccatacccgcttcaaccaaacagccacggcgaccggtcgtttgtcctcctctgatccaaaccttcagaatattccagtacgtaccccattgggccagaagatccgccgtgcgtttgtagctgaggagggttgggcgttagtggccctcgattatcgtcaaattgaattacgtgtccttgcccatctttctggcgatgagaacctcatccgcgtgtttcaggaaggcaaagacattcacactcaaacggcaagctggatgtttggattatcagctgaagcgatcgatcctttgatgcgtcgtgcagcgaagaccatcaatttcggtgttctctacggtatgagtgcctttcgtttgtcgcaggaattaggcattccctatgaagaagctcaggcgttcattcagaaatactttcaaagctatcccaaagttaaagcatggatcgagaagactctccgtgaaggccgcacacgtggttacgtagagaccttatttggacgtcgccgctatgttcccgatttaaacgctcgcgtgaaaggcaagcgtgaagccgccgaacgcatggcgttcaacatgcctgtacagggcacggcagctgacctcatgaaacttgcaatggtgcgcctttttccacaattgcgtgaagttggtgcccgcatgctgttgcaggtccacgatgaactcttgttagaagcgccaaaagagcgtgcggaagaggtggcagccctcgcgaaagaagttatggaaggcgtgtggcccttagcggtgcctcttgaagtcgaagttggtattggcgaggattggctggctgccaaagga

SEQ ID NO: 6554 - protein, 841 aa, synthetic construct
  REGION 1..841: note = Variant of DNA polymerase I from Thermus sp. strain 2.9
MHHHHHHGGSGVLPVFEPKGRVLLVDGHHLAYRNFFALKGLTTSLGEPVQGVYGFAKSLLKALKEDGDVVIVVFDAKAPSFRHEAYEAYKAGRAPTPEDFPRQLALMKELVDLLGLERLEVPGFEADDVLATLAKKAEREGYEVQILTADRDLFQLLSPRISVLHPEGHRITPEWLWEKYGLRPEQWVDFRALAGDPSDNIPGVKGIGEKTALKLLKEWGSLENLLKNLDQVKPESVREKILAHLEDLKLSRELSRVRTDLPLEVDFGRRREPDWEGLKAFLERLEFGSLLHEFGLLESPLLAEEAPWPPPEGAFLGYRLSRPEPMWAELLALAASAQGRVYRAEDPHGALRGLFEVRGLLAKDLAVVALREGLDLPPTDDPMLLAYLLDPSNTTPEGVARRYGGEWTEDAGKRALLAERLHENLLGRLQGEERLLWLYEEVEKPLSRVLAHMEATGVKLDVAYLENLSLEVAAHMRRLEEEVFRLAGRSFRLNSRDQLERVLFDELGLPPIGKTEKTGKRSTSAAVLEALREVHPIVDKILQYREMAKLKGTYIDRLPALVHPKTGRLHTRFNQTATATGRLSSSDPNLQNIPVRTPLGQKIRRAFVAEEGWALVALDYRQIELRVLAHLSGDENLIRVFQEGKDIHTQTASWMFGLSAEAIDPLMRRAAKTINFGVLYGMSAFRLSQELGIPYEEAQAFIQKYFQSYPKVKAWIEKTLREGRTRGYVETLFGRRRYVPDLNARVKGKREAAERMAFNMPVQGTAADLMKLAMVRLFPQLREVGARMLLQVHDELLLEAPKERAEEVAALAKEVMEGVWPLAVPLEVEVGIGEDWLAAKG

SEQ ID NO: 6555 - DNA, 2523 bp, synthetic construct
  misc_feature 1..2523: note = Variant of DNA polymerase I from Thermus sp. strain 2.9
  source 1..2523: mol_type = other DNA
atgcaccatcatcatcatcatggcggtagcggcgtgttaccggtgttcgagcctaaaggtcgcgtgcttctggttgatggccatcatctcgcgtatcgtaacttctttgccctgaaaggattaaccaccagcctgggcgagccggtacagggtgtctacggctttgcaaagtcgctcctgaaagctctgaaagaagacggtgatgtggtgattgttgtctttgatgcgaaagcgccaagttttcgccacgaagcgtacgaagcttacaaagccgggcgtgctccaacgccggaagactttcctcgccaattggcgcttatgaaggaattagtggatttgcttggcctcgaacgcttggaagttcccggtttcgaggcagacgacgtattagcgactctcgcaaagaaagccgaacgtgagggctatgaagtccagatcttgacagcagatcgcgatcttttccagcttttatctccgcgcatctcggtgttacacccggaagggcatcgtatcaccccggaatggctctgggagaaatatggtttgcgtcccgaacaatgggtggattttcgcgccttagcaggcgatccgagcgacaatattccgggagttaaaggtatcggcgagaagacggcgctcaagctccttaaagaatgggggtcgttggagaacttgcttaagaatttagatcaggtcaaaccagagtcagtgcgtgagaagattcttgctcacctcgaagacctcaaattaagccgcgaattgtcccgtgtacgcaccgatttgccgctcgaagttgatttcggtcgccgccgcgaacctgactgggagggtcttaaagcgtttttagagcgtcttgaatttggttcgctcttgcatgaattcggccttttagaaagcccgttactggccgaagaagcaccttggccaccgcccgagggcgcgtttttaggttaccgtttgagtcgcccggaaccgatgtgggccgaattactggctcttgcagcgtctgcccagggacgtgtgtatcgcgcggaagaccctcatggtgcgctccgcggcctcttcgaagtccgtggactccttgccaaagacttagctgttgttgcattgcgcgaaggtcttgatttacctccgactgatgatccaatgcttcttgcgtacctcttggacccgtcaaacacgacgcccgaaggcgtagcccgtcgttacggcggcgagtggtgggaagatgcagccaaacgcgcgttattggccgaacgtttgcacgaaaatttattaggacgtttgcaaggcgaggaacgtctcctctggctttacgaagaagtggagaaaccattgagtcgcgtgctcgcgcatatggaagctaccggtgtcaaattagacgtggcgtatttggagaatctcagccttgaagttgctgcccacatgcgccgcttggaggaagaagtattccgtttagcaggccgttcctttcgccttaactctcgcgatcagttagaacgtgtgttgttcgatgaacttggtctccctcctatcggcaagacagagaagaccggtaaacgtagcacttcagcggcggttttagaagctcttcgcgaagtccatcccattgtggacaagatcttgcagtaccgcgaaatggcgaaattgaaaggcacctatattgaccgtcttccggcattagtccacccgaaaacgggacgcctccatacccgcttcaaccaaacagccacggcgaccggtcgtttgtcctcctctgatccaaaccttcagaatattccagtacgtaccccattgggccagaagatccgccgtgcgtttgtagctgaggagggttgggcgttagtggccctcgattatcgtcaaattgaattacgtgtccttgcccatctttctggcgatgagaacctcatccgcgtgtttcaggaaggcaaagacattcacactcaaacggcaagctggatgtttggattatcagctgaagcgatcgatcctttgatgcgtcgtgcagcgaagaccatcaatttcggtgttctctacggtatgagtgcctttcgtttgtcgcaggaattaggcattccctatgaagaagctcaggcgttcattcagaaatactttcaaagctatcccaaagttaaagcatggatcgagaagactctccgtgaaggccgcacacgtggttacgtagagaccttatttggacgtcgccgctatgttcccgatttaaacgctcgcgtgaaaggcaagcgtgaagccgccgaacgcatggcgttcaacatgcctgtacagggcacggcagctgacctcatgaaacttgcaatggtgcgcctttttccacaattgcgtgaagttggtgcccgcatgctcttgcaggtccacgatgaactcttgttagaagcgccaaaagagcgtgcggaagaggtggcagccctcgcgaaagaagttatggaaggcgtgtggcccttagcggtgcctcttgaagtcgaagttggtattggcgaggattggctggctgccaaagga

SEQ ID NO: 6556 - protein, 841 aa, synthetic construct
  REGION 1..841: note = Variant of DNA polymerase I from Thermus sp. strain 2.9
MHHHHHHGGSGVLPVFEPKGRVLLVDGHHLAYRNFFALKGLTTSLGEPVQGVYGFAKSLLKALKEDGDVVIVVFDAKAPSFRHEAYEAYKAGRAPTPEDFPRQLALMKELVDLLGLERLEVPGFEADDVLATLAKKAEREGYEVQILTADRDLFQLLSPRISVLHPEGHRITPEWLWEKYGLRPEQWVDFRALAGDPSDNIPGVKGIGEKTALKLLKEWGSLENLLKNLDQVKPESVREKILAHLEDLKLSRELSRVRTDLPLEVDFGRRREPDWEGLKAFLERLEFGSLLHEFGLLESPLLAEEAPWPPPEGAFLGYRLSRPEPMWAELLALAASAQGRVYRAEDPHGALRGLFEVRGLLAKDLAVVALREGLDLPPTDDPMLLAYLLDPSNTTPEGVARRYGGEWWEDAAKRALLAERLHENLLGRLQGEERLLWLYEEVEKPLSRVLAHMEATGVKLDVAYLENLSLEVAAHMRRLEEEVFRLAGRSFRLNSRDQLERVLFDELGLPPIGKTEKTGKRSTSAAVLEALREVHPIVDKILQYREMAKLKGTYIDRLPALVHPKTGRLHTRFNQTATATGRLSSSDPNLQNIPVRTPLGQKIRRAFVAEEGWALVALDYRQIELRVLAHLSGDENLIRVFQEGKDIHTQTASWMFGLSAEAIDPLMRRAAKTINFGVLYGMSAFRLSQELGIPYEEAQAFIQKYFQSYPKVKAWIEKTLREGRTRGYVETLFGRRRYVPDLNARVKGKREAAERMAFNMPVQGTAADLMKLAMVRLFPQLREVGARMLLQVHDELLLEAPKERAEEVAALAKEVMEGVWPLAVPLEVEVGIGEDWLAAKG

SEQ ID NO: 6557 - DNA, 2523 bp, synthetic construct
  misc_feature 1..2523: note = Variant of DNA polymerase I from Thermus sp. strain 2.9
  source 1..2523: mol_type = other DNA
atgcaccatcatcatcatcatggcggtagcggcgtgttaccggtgttcgagcctaaaggtcgcgtgcttctggttgatggccatcatctcgcgtatcgtaacttctttgccctgaaaggattaaccaccagcctgggcgagccggtacagggtgtctacggctttgcaaagtcgctcctgaaagctctgaaagaagacggtgatgtggtgattgttgtctttgatgcgaaagcgccaagttttcgccacgaagcgtacgaagcttacaaagccgggcgtgctccaacgccggaagactttcctcgccaattggcgcttatgaaggaattagtggatttgcttggcctcgaacgcttggaagttcccggtttcgaggcagacgacgtattagcgactctcgcaaagaaagccgaacgtgagggctatgaagtccagatcttgacagcagatcgcgatcttttccagcttttatctccgcgcatctcggtgttacacccggaagggcatcgtatcaccccggaatggctctgggagaaatatggtttgcgtcccgaacaatgggtggattttcgcgccttagcaggcgatccgagcgacaatattccgggagttaaaggtatcggcgagaagacggcgctcaagctccttaaagaatgggggtcgttggagaacttgcttaagaatttagatcaggtcaaaccagagtcagtgcgtgagaagattcttgctcacctcgaagacctcaaattaagccgcgaattgtcccgtgtacgcaccgatttgccgctcgaagttgatttcggtcgccgccgcgaacctgactgggagggtcttaaagcgtttttagagcgtcttgaatttggttcgctcttgcatgaattcggccttttagaaagcccgttactggccgaagaagcaccttggccaccgcccgagggcgcgtttttaggttaccgtttgagtcgcccggaaccgatgtgggccgaattactggctcttgcagcgtctgcccagggacgtgtgtatcgcgcggaagaccctcatggtgcgctccgcggcctcttcgaagtccgtggactccttgccaaagacttagctgttgttgcattgcgcgaaggtcttgatttacctccgactgatgatccaatgcttcttgcgtacctcttggacccgtcaaacacgacgcccgaaggcgtagcccgtcgttacggcggcgagtggaccgaagatgcagcgaaacgcgcgttattggccgaacgtttgcacgaaaatttattaggacgtttgcaaggcgaggagcgtctccgttggctttacgaagaagtggagaaaccattgagtcgcgtgctcgcgcatatggaagctaccggtgtcaaattagacgtggcgtatttggagaatctcagccttgaagttgctgcccacatgcgccgcttggaggaagaagtattccgtttagcaggccgttcctttcgccttaactctcgcgatcagttagaacgtgtgttgttcgatgaacttggtctccctcctatcggcaagacagagaagaccggtaaacgtagcacttcagcggcggttttagaagctcttcgcgaagtccatcccattgtggacaagatcttgcagtaccgcgaaatggcgaaattgaaaggcacctatattgaccgtcttccggcattagtccacccgaaaacgggacgcctccatacccgcttcaaccaaacagccacggcgaccggtcgtttgtcctcctctgatccaaaccttcagaatattccagtacgtaccccattgggccagaagatccgccgtgcgtttgtagctgagccgggttggcgtttagtggccctcgattatcgtcaaattgaattacgtgtccttgcccatctttctggcgatgagaacctcatccgcgtgtttcaggaaggcaaagacattcacactcaaacggcaagctggatgtttggattatcagctgaagcgatcgatcctttgatgcgtcgtgcagcgaagaccatcaatttcggtgttctctacggtatgagtgcctttcgtttgtcgcaggaattaggcattccctatgaagaagctcaggcgttcattcagaaatactttcaaagctatcccaaagttaaagcatggatcgagaagactctccgtgaaggccgcacacgtggttacgtagagaccttatttggacgtcgccgctatgttcccgatttaaacgctcgcgtgaaaggcaagcgtgaagccgccgaacgcatggcgttcaacatgcctgtacagggcacggcagctgacctcatgaaacttgcaatggtgcgcctttttccacaattgcgtgaagttggtgcccgcatgctgttgcaggtccacgatgaactcttgttagaagcgccaaaagagcgtgcggaagaggtggcagccctcgcgaaagaagttatggaaggcgtgtggcccttagcggtgcctcttgaagtcgaagttggtattggcgaggattggctggctgccaaagga

SEQ ID NO: 6558 - protein, 841 aa, synthetic construct
  REGION 1..841: note = Variant of DNA polymerase I from Thermus sp. strain 2.9
MHHHHHHGGSGVLPVFEPKGRVLLVDGHHLAYRNFFALKGLTTSLGEPVQGVYGFAKSLLKALKEDGDVVIVVFDAKAPSFRHEAYEAYKAGRAPTPEDFPRQLALMKELVDLLGLERLEVPGFEADDVLATLAKKAEREGYEVQILTADRDLFQLLSPRISVLHPEGHRITPEWLWEKYGLRPEQWVDFRALAGDPSDNIPGVKGIGEKTALKLLKEWGSLENLLKNLDQVKPESVREKILAHLEDLKLSRELSRVRTDLPLEVDFGRRREPDWEGLKAFLERLEFGSLLHEFGLLESPLLAEEAPWPPPEGAFLGYRLSRPEPMWAELLALAASAQGRVYRAEDPHGALRGLFEVRGLLAKDLAVVALREGLDLPPTDDPMLLAYLLDPSNTTPEGVARRYGGEWTEDAAKRALLAERLHENLLGRLQGEERLRWLYEEVEKPLSRVLAHMEATGVKLDVAYLENLSLEVAAHMRRLEEEVFRLAGRSFRLNSRDQLERVLFDELGLPPIGKTEKTGKRSTSAAVLEALREVHPIVDKILQYREMAKLKGTYIDRLPALVHPKTGRLHTRFNQTATATGRLSSSDPNLQNIPVRTPLGQKIRRAFVAEPGWRLVALDYRQIELRVLAHLSGDENLIRVFQEGKDIHTQTASWMFGLSAEAIDPLMRRAAKTINFGVLYGMSAFRLSQELGIPYEEAQAFIQKYFQSYPKVKAWIEKTLREGRTRGYVETLFGRRRYVPDLNARVKGKREAAERMAFNMPVQGTAADLMKLAMVRLFPQLREVGARMLLQVHDELLLEAPKERAEEVAALAKEVMEGVWPLAVPLEVEVGIGEDWLAAKG

SEQ ID NO: 6559 - DNA, 2523 bp, synthetic construct
  misc_feature 1..2523: note = Variant of DNA polymerase I from Thermus sp. strain 2.9
  source 1..2523: mol_type = other DNA
atgcaccatcatcatcatcatggcggtagcggcgtgttaccggtgttcgagcctaaaggtcgcgtgcttctggttgatggccatcatctcgcgtatcgtaacttctttgccctgaaaggattaaccaccagcctgggcgagccggtacagggtgtctacggctttgcaaagtcgctcctgaaagctctgaaagaagacggtgatgtggtgattgttgtctttgatgcgaaagcgccaagttttcgccacgaagcgtacgaagcttacaaagccgggcgtgctccaacgccggaagactttcctcgccaattggcgcttatgaaggaattagtggatttgcttggcctcgaacgcttggaagttcccggtttcgaggcagacgacgtattagcgactctcgcaaagaaagccgaacgtgagggctatgaagtccagatcttgacagcagatcgcgatcttttccagcttttatctccgcgcatctcggtgttacacccggaagggcatcgtatcaccccggaatggctctgggagaaatatggtttgcgtcccgaacaatgggtggattttcgcgccttagcaggcgatccgagcgacaatattccgggagttaaaggtatcggcgagaagacggcgctcaagctccttaaagaatgggggtcgttggagaacttgcttaagaatttagatcaggtcaaaccagagtcagtgcgtgagaagattcttgctcacctcgaagacctcaaattaagccgcgaattgtcccgtgtacgcaccgatttgccgctcgaagttgatttcggtcgccgccgcgaacctgactgggagggtcttaaagcgtttttagagcgtcttgaatttggttcgctcttgcatgaattcggccttttagaaagcccgttactggccgaagaagcaccttggccaccgcccgagggcgcgtttttaggttaccgtttgagtcgcccggaaccgatgtgggccgaattactggctcttgcagcgtctgcccagggacgtgtgtatcgcgcggaagaccctcatggtgcgctccgcggcctcttcgaagtccgtggcctccttgccaaagacttagctgttgttgcattgcgcgaaggtcttgatttacctccgactgatgatccaatgcttcttgcgtacctcttggacccgtcaaacacgacgcccgaaggcgtagcccgtcgttacggcggcgagtggaccgaagatgcagcgaaacgcgcgttattggccgaacgtttgcacgaaaatttattaggacgtttgcaaggcgaggcgcgtctcctgtggctttacgaagaagtggagaaaccattgagtcgcgtgctcgcgcatatggaagctaccggtgtcaaattagacgtggcgtatttggagaatctcagccttgaagttgctgcccacatgcgccgcttggaggaagaagtattccgtttagcaggccgttcctttcgccttaactctcgcgatcagttagaacgtgtgttgttcgatgaacttggtctccctcctatcggcaagacagagaagaccggtaaacgtagcacttcagcggcggttttagaagctcttcgcgaagtccatcccattgtggacaagatcttgcagtaccgcgaaatggcgaaattgaaaggcacctatattgaccgtcttccggcattagtccacccgaaaacgggacgcctccatacccgcttcaaccaaacagccacggcgaccggtcgtttgtcctcctctgatccaaaccttcagaatattccagtacgtaccccattgggccagaagatccgccgtgcgtttgtagctgaggagggttgggcgttagtggccctcgattatcgtcaaattgaattacgtgtccttgcccatctttctggcgatgagaacctcatccgcgtgtttcaggaaggcaaagacattcacactcaaacggcaagctggatgtttggattatcagctgaagcgatcgatcctttgatgcgtcgtgcagcgaagaccatcaatttcggtgttctctacggtatgagtgcctttcgtttgtcgcaggaattaggcattccctatgaagaagctcaggctttcattcagaaatactttcaaggctatcccaaagttaaagcatggatcgagaagactctccgtgaaggccgcacacgtggttacgtagagaccttatttggacgtcgccgctatgttcccgatttaaacgctcgcgtgaaaggcaagcgtgaagccgccgaacgcatggcgttcaacatgcctgtacagggcacggcagctgacctcatgaaacttgcaatggtgcgcctttttccacaattgcgtgaagttggtgcccgcatgctcttgcaggtccacgatgaactcttgttagaagcgccaaaagagcgtgcggaagaggtggcagccctcgcgaaagaagttatggaaggcgtgtggcccttagcggtgcctcttgaagtcgaagttggtattggcgaggattggctggctgccaaagga

SEQ ID NO: 6560 - protein, 841 aa, synthetic construct
  REGION 1..841: note = Variant of DNA polymerase I from Thermus sp. strain 2.9
MHHHHHHGGSGVLPVFEPKGRVLLVDGHHLAYRNFFALKGLTTSLGEPVQGVYGFAKSLLKALKEDGDVVIVVFDAKAPSFRHEAYEAYKAGRAPTPEDFPRQLALMKELVDLLGLERLEVPGFEADDVLATLAKKAEREGYEVQILTADRDLFQLLSPRISVLHPEGHRITPEWLWEKYGLRPEQWVDFRALAGDPSDNIPGVKGIGEKTALKLLKEWGSLENLLKNLDQVKPESVREKILAHLEDLKLSRELSRVRTDLPLEVDFGRRREPDWEGLKAFLERLEFGSLLHEFGLLESPLLAEEAPWPPPEGAFLGYRLSRPEPMWAELLALAASAQGRVYRAEDPHGALRGLFEVRGLLAKDLAVVALREGLDLPPTDDPMLLAYLLDPSNTTPEGVARRYGGEWTEDAAKRALLAERLHENLLGRLQGEARLLWLYEEVEKPLSRVLAHMEATGVKLDVAYLENLSLEVAAHMRRLEEEVFRLAGRSFRLNSRDQLERVLFDELGLPPIGKTEKTGKRSTSAAVLEALREVHPIVDKILQYREMAKLKGTYIDRLPALVHPKTGRLHTRFNQTATATGRLSSSDPNLQNIPVRTPLGQKIRRAFVAEEGWALVALDYRQIELRVLAHLSGDENLIRVFQEGKDIHTQTASWMFGLSAEAIDPLMRRAAKTINFGVLYGMSAFRLSQELGIPYEEAQAFIQKYFQGYPKVKAWIEKTLREGRTRGYVETLFGRRRYVPDLNARVKGKREAAERMAFNMPVQGTAADLMKLAMVRLFPQLREVGARMLLQVHDELLLEAPKERAEEVAALAKEVMEGVWPLAVPLEVEVGIGEDWLAAKG

SEQ ID NO: 6561 - DNA, 2523 bp, synthetic construct
  misc_feature 1..2523: note = Variant of DNA polymerase I from Thermus sp. strain 2.9
  source 1..2523: mol_type = other DNA
atgcaccatcatcatcatcatggcggtagcggcgtgttaccggtgttcgagcctaaaggtcgcgtgcttctggttgatggccatcatctcgcgtatcgtaacttctttgccctgaaaggattaaccaccagcctgggcgagccggtacagggtgtctacggctttgcaaagtcgctcctgaaagctctgaaagaagacggtgatgtggtgattgttgtctttgatgcgaaagcgccaagttttcgccacgaagcgtacgaagcttacaaagccgggcgtgctccaacgccggaagactttcctcgccaattggcgcttatgaaggaattagtggatttgcttggcctcgaacgcttggaagttcccggtttcgaggcagacgacgtattagcgactctcgcaaagaaagccgaacgtgagggctatgaagtccagatcttgacagcagatcgcgatcttttccagcttttatctccgcgcatctcggtgttacacccggaagggcatcgtatcaccccggaatggctctgggagaaatatggtttgcgtcccgaacaatgggtggattttcgcgccttagcaggcgatccgagcgacaatattccgggagttaaaggtatcggcgagaagacggcgctcaagctccttaaagaatgggggtcgttggagaacttgcttaagaatttagatcaggtcaaaccagagtcagtgcgtgagaagattcttgctcacctcgaagacctcaaattaagccgcgaattgtcccgtgtacgcaccgatttgccgctcgaagttgatttcggtcgccgccgcgaacctgactgggagggtcttaaagcgtttttagagcgtcttgaatttggttcgctcttgcatgaattcggccttttagaaagcccgttactggccgaagaagcaccttggccaccgcccgagggcgcgtttttaggttaccgtttgagtcgcccggaaccgatgtgggccgaattactggctcttgcagcgtctgcccagggacgtgtgtatcgcgcggaagaccctcatggtgcgctccgcggcctcttcgaagtccgtaccctccttgccaaagacttagctgttgttgcattgcgcgaaggtcttgatttacctccgactgatgatccaatgcttcttgcgtacctcttggacccgtcaaacacgacgcccgaaggcgtagcccgtcgttacggcggcgagtggtgggaagatgcagccaaacgcgcgttattggccgaacgtttgcacgaaaatttattaggacgtttgcaaggcgaggaacgtctcctctggctttacgaagaagtggagaaaccattgagtcgcgtgctcgcgcatatggaagctaccggtgtcaaattagacgtggcgtatttggagaatctcagccttgaagttgctgcccacatgcgccgcttggaggaagaagtattccgtttagcaggccgttcctttcgccttaactctcgcgatcagttagaacgtgtgttgttcgatgaacttggtctccctcctatcggcaagacagagaagaccggtaaacgtagcacttcagcggcggttttagaagctcttcgcgaagtccatcccattgtggacaagatcttgcagtaccgcgaaatggcgaaattgaaaggcacctatattgaccgtcttccggcattagtccacccgaaaacgggacgcctccatacccgcttcaaccaaacagccacggcgaccggtcgtttgtcctcctctgatccaaaccttcagaatattccagtacgtaccccattgggccagaagatccgccgtgcgtttgtagctgaggagggttggcgtttagtggccctcgattatcgtcaaattgaattacgtgtccttgcccatctttctggcgatgagaacctcatccgcgtgtttcaggaaggcaaagacattcacactcaaacggcaagctggatgtttggattatcagctgaagcgatcgatcctttgatgcgtcgtgcagcgaagaccatcaatttcggtgttctctacggtatgagtgcctttcgtttgtcgcaggaattaggcattccctatgaagaagctcaggcgttcattcagaaatactttcaaagctatcccaaagttaaagcatggatcgagaagactctccgtgaaggccgcacacgtggttacgtagagaccttatttggacgtcgccgctatgttcccgatttaaacgctcgcgtgaaaggcaagcgtgaagccgccgaacgcatggcgttcaacatgcctgtacagggcacggcagctgacctcatgaaacttgcaatggtgcgcctttttccacaattgcgtgaagttggtgcccgcatgctgttgcaggtccacgatgaactcttgttagaagcgccaaaagagcgtgcggaagaggtggcagccctcgcgaaagaagttatggaaggcgtgtggcccttagcggtgcctcttgaagtcgaagttggtattggcgaggattggctggctgccaaagga

SEQ ID NO: 6562 - protein, 841 aa, synthetic construct
  REGION 1..841: note = Variant of DNA polymerase I from Thermus sp. strain 2.9
MHHHHHHGGSGVLPVFEPKGRVLLVDGHHLAYRNFFALKGLTTSLGEPVQGVYGFAKSLLKALKEDGDVVIVVFDAKAPSFRHEAYEAYKAGRAPTPEDFPRQLALMKELVDLLGLERLEVPGFEADDVLATLAKKAEREGYEVQILTADRDLFQLLSPRISVLHPEGHRITPEWLWEKYGLRPEQWVDFRALAGDPSDNIPGVKGIGEKTALKLLKEWGSLENLLKNLDQVKPESVREKILAHLEDLKLSRELSRVRTDLPLEVDFGRRREPDWEGLKAFLERLEFGSLLHEFGLLESPLLAEEAPWPPPEGAFLGYRLSRPEPMWAELLALAASAQGRVYRAEDPHGALRGLFEVRTLLAKDLAVVALREGLDLPPTDDPMLLAYLLDPSNTTPEGVARRYGGEWWEDAAKRALLAERLHENLLGRLQGEERLLWLYEEVEKPLSRVLAHMEATGVKLDVAYLENLSLEVAAHMRRLEEEVFRLAGRSFRLNSRDQLERVLFDELGLPPIGKTEKTGKRSTSAAVLEALREVHPIVDKILQYREMAKLKGTYIDRLPALVHPKTGRLHTRFNQTATATGRLSSSDPNLQNIPVRTPLGQKIRRAFVAEEGWRLVALDYRQIELRVLAHLSGDENLIRVFQEGKDIHTQTASWMFGLSAEAIDPLMRRAAKTINFGVLYGMSAFRLSQELGIPYEEAQAFIQKYFQSYPKVKAWIEKTLREGRTRGYVETLFGRRRYVPDLNARVKGKREAAERMAFNMPVQGTAADLMKLAMVRLFPQLREVGARMLLQVHDELLLEAPKERAEEVAALAKEVMEGVWPLAVPLEVEVGIGEDWLAAKG

SEQ ID NO: 6563 - DNA, 2523 bp, synthetic construct
  misc_feature 1..2523: note = Variant of DNA polymerase I from Thermus sp. strain 2.9
  source 1..2523: mol_type = other DNA
atgcaccatcatcatcatcatggcggtagcggcgtgttaccggtgttcgagcctaaaggtcgcgtgcttctggttgatggccatcatctcgcgtatcgtaacttctttgccctgaaaggattaaccaccagcctgggcgagccggtacagggtgtctacggctttgcaaagtcgctcctgaaagctctgaaagaagacggtgatgtggtgattgttgtctttgatgcgaaagcgccaagttttcgccacgaagcgtacgaagcttacaaagccgggcgtgctccaacgccggaagactttcctcgccaattggcgcttatgaaggaattagtggatttgcttggcctcgaacgcttggaagttcccggtttcgaggcagacgacgtattagcgactctcgcaaagaaagccgaacgtgagggctatgaagtccagatcttgacagcagatcgcgatcttttccagcttttatctccgcgcatctcggtgttacacccggaagggcatcgtatcaccccggaatggctctgggagaaatatggtttgcgtcccgaacaatgggtggattttcgcgccttagcaggcgatccgagcgacaatattccgggagttaaaggtatcggcgagaagacggcgctcaagctccttaaagaatgggggtcgttggagaacttgcttaagaatttagatcaggtcaaaccagagtcagtgcgtgagaagattcttgctcacctcgaagacctcaaattaagccgcgaattgtcccgtgtacgcaccgatttgccgctcgaagttgatttcggtcgccgccgcgaacctgactgggagggtcttaaagcgtttttagagcgtcttgaatttggttcgctcttgcatgaattcggccttttagaaagcccgttactggccgaagaagcaccttggccaccgcccgagggcgcgtttttaggttaccgtttgagtcgcccggaaccgatgtgggccgaattactggctcttgcagcgtctgcccagggacgtgtgtatcgcgcggaagaccctcatggtgcgctccgcggcctcttcgaagtccgtggcctccttgccaaagacttagctgttgttgcattgcgcgaaggtcttgatttacctccgactgatgatccaatgcttcttgcgtacctcttggacccgtcaaacacgacgcccgaaggcgtagcccgtcgttacggcggcgagtggaccgaagatgcagccaaacgcgcgttattggccgaacgtttgcacgaaaatttattaggacgtttgcaaggcgaggaacgtctcctctggctttacgaagaagtggagaaaccattgagtcgcgtgctcgcgcatatggaagctaccggtgtcaaattagacgtggcgtatttggagaatctcagccttgaagttgctgcccacatgcgccgcttggaggaagaagtattccgtttagcaggccgttcctttcgccttaactctcgcgatcagttagaacgtgtgttgttcgatgaacttggtctccctcctatcggcaagacagagaagaccggtaaacgtagcacttcagcggcggttttagaagctcttcgcgaagtccatcccattgtggacaagatcttgcagtaccgcgaaatggcgaaattgaaaggcacctatattgaccgtcttccggcattagtccacccgaaaacgggacgcctccatacccgcttcaaccaaacagccacggcgaccggtcgtttgtcctcctctgatccaaaccttcagaatattccagtacgtaccccattgggccagaagatccgccgtgcgtttgtagctgaggagggttgggcgttagtggccctcgattatcgtcaaattgaattacgtgtccttgcccatctttctggcgatgagaacctcatccgcgtgtttcaggaaggcaaagacattcacactcaaacggcaagctggatgtttggattatcagctgaagcgatcgatcctttgatgcgtcgtgcagcgaagaccatcaatttcggtgttctctacggtatgagtgcctttcgtttgtcgcaggaattaggcattccctatgaagaagctcagggtttcattcagaaatactttcaaagctatcccaaagttaaagcatggatcgagaagactctccgtgaaggccgcacacgtggttacgtagagaccttatttggacgtcgccgctatgttcccgatttaaacgctcgcgtgaaaggcaagcgtgaagccgccgaacgcatggcgttcaacatgcctgtacagggcacggcagctgacctcatgaaacttgcaatggtgcgcctttttccacaattgcgtgaagttggtgcccgcatgctcttgcaggtccacgatgaactcttgttagaagcgccaaaagagcgtgcggaagaggtggcagccctcgcgaaagaagttatggaaggcgtgtggcccttagcggtgcctcttgaagtcgaagttggtattggcgaggattggctggctgccaaagga

SEQ ID NO: 6564 - protein, 841 aa, synthetic construct
  REGION 1..841: note = Variant of DNA polymerase I from Thermus sp. strain 2.9
MHHHHHHGGSGVLPVFEPKGRVLLVDGHHLAYRNFFALKGLTTSLGEPVQGVYGFAKSLLKALKEDGDVVIVVFDAKAPSFRHEAYEAYKAGRAPTPEDFPRQLALMKELVDLLGLERLEVPGFEADDVLATLAKKAEREGYEVQILTADRDLFQLLSPRISVLHPEGHRITPEWLWEKYGLRPEQWVDFRALAGDPSDNIPGVKGIGEKTALKLLKEWGSLENLLKNLDQVKPESVREKILAHLEDLKLSRELSRVRTDLPLEVDFGRRREPDWEGLKAFLERLEFGSLLHEFGLLESPLLAEEAPWPPPEGAFLGYRLSRPEPMWAELLALAASAQGRVYRAEDPHGALRGLFEVRGLLAKDLAVVALREGLDLPPTDDPMLLAYLLDPSNTTPEGVARRYGGEWTEDAAKRALLAERLHENLLGRLQGEERLLWLYEEVEKPLSRVLAHMEATGVKLDVAYLENLSLEVAAHMRRLEEEVFRLAGRSFRLNSRDQLERVLFDELGLPPIGKTEKTGKRSTSAAVLEALREVHPIVDKILQYREMAKLKGTYIDRLPALVHPKTGRLHTRFNQTATATGRLSSSDPNLQNIPVRTPLGQKIRRAFVAEEGWALVALDYRQIELRVLAHLSGDENLIRVFQEGKDIHTQTASWMFGLSAEAIDPLMRRAAKTINFGVLYGMSAFRLSQELGIPYEEAQGFIQKYFQSYPKVKAWIEKTLREGRTRGYVETLFGRRRYVPDLNARVKGKREAAERMAFNMPVQGTAADLMKLAMVRLFPQLREVGARMLLQVHDELLLEAPKERAEEVAALAKEVMEGVWPLAVPLEVEVGIGEDWLAAKG

SEQ ID NO: 6565 - DNA, 2523 bp, synthetic construct
  misc_feature 1..2523: note = Variant of DNA polymerase I from Thermus sp. strain 2.9
  source 1..2523: mol_type = other DNA
atgcaccatcatcatcatcatggcggtagcggcgtgttaccggtgttcgagcctaaaggtcgcgtgcttctggttgatggccatcatctcgcgtatcgtaacttctttgccctgaaaggattaaccaccagcctgggcgagccggtacagggtgtctacggctttgcaaagtcgctcctgaaagctctgaaagaagacggtgatgtggtgattgttgtctttgatgcgaaagcgccaagttttcgccacgaagcgtacgaagcttacaaagccgggcgtgctccaacgccggaagactttcctcgccaattggcgcttatgaaggaattagtggatttgcttggcctcgaacgcttggaagttcccggtttcgaggcagacgacgtattagcgactctcgcaaagaaagccgaacgtgagggctatgaagtccagatcttgacagcagatcgcgatcttttccagcttttatctccgcgcatctcggtgttacacccggaagggcatcgtatcaccccggaatggctctgggagaaatatggtttgcgtcccgaacaatgggtggattttcgcgccttagcaggcgatccgagcgacaatattccgggagttaaaggtatcggcgagaagacggcgctcaagctccttaaagaatgggggtcgttggagaacttgcttaagaatttagatcaggtcaaaccagagtcagtgcgtgagaagattcttgctcacctcgaagacctcaaattaagccgcgaattgtcccgtgtacgcaccgatttgccgctcgaagttgatttcggtcgccgccgcgaacctgactgggagggtcttaaagcgtttttagagcgtcttgaatttggttcgctcttgcatgaattcggccttttagaaagcccgttactggccgaagaagcaccttggccaccgcccgagggcgcgtttttaggttaccgtttgagtcgcccggaaccgatgtgggccgaattactggctcttgcagcgtctgcccagggacgtgtgtatcgcgcggaagaccctcatggtgcgctccgcggcctcttcgaagtccgtaccctccttgccaaagacttagctgttgttgcattgcgcgaaggtcttgatttacctccgactgatgatccaatgcttcttgcgtacctcttggacccgtcaaacacgacgcccgaaggcgtagcccgtcgttacggcggcgagtggaccgaagatgcagcgaaacgcgcgttattggccgaacgtttgcacgaaaatttattaggacgtttgcaaggcgaggaacgtctcctctggctttacgaagaagtggagaaaccattgagtcgcgtgctcgcgcatatggaagctaccggtgtcaaattagacgtggcgtatttggagaatctcagccttgaagttgctgcccacatgcgccgcttggaggaagaagtattccgtttagcaggccgttcctttcgccttaactctcgcgatcagttagaacgtgtgttgttcgatgaacttggtctccctcctatcggcaagacagagaagaccggtaaacgtagcacttcagcggcggttttagaagctcttcgcgaagtccatcccattgtggacaagatcttgcagtaccgcgaaatggcgaaattgaaaggcacctatattgaccgtcttccggcattagtccacccgaaaacgggacgcctccatacccgcttcaaccaaacagccacggcgaccggtcgtttgtcctcctctgatccaaaccttcagaatattccagtacgtaccccattgggccagaagatccgccgtgcgtttgtagctgaggagggttgggcgttagtggccctcgattatcgtcaaattgaattacgtgtccttgcccatctttctggcgatgagaacctcatccgcgtgtttcaggaaggcaaagacattcacactcaaacggcaagctggatgtttggattatcagctgaagcgatcgatcctttgatgcgtcgtgcagcgaagaccatcaatttcggtgttctctacggtatgagtgcctttcgtttgtcgcaggaattaggcattccctatgaagaagctcaggctttcattcagaaatactttcaaagctatcccaaagttaaagcatggatcgagaagactctccgtgaaggccgcacacgtggttacgtagagaccttatttggacgtcgccgctatgttcccgatttaaactcgcgcgtgaaaggcaagcgtgaagccgccgaacgcatggcgttcaacatgcctgtacagggcacggcagctgacctcatgaaacttgcaatggtgcgcctttttccacaattgcgtgaagttggtgcccgcatgctcttgcaggtccacgatgaactcttgttagaagcgccaaaagagcgtgcggaagaggtggcagccctcgcgaaagaagttatggaaggcgtgtggcccttagcggtgcctcttgaagtcgaagttggtattggcgaggattggctggctgccaaagga

SEQ ID NO: 6566 - protein, 841 aa, synthetic construct
  REGION 1..841: note = Variant of DNA polymerase I from Thermus sp. strain 2.9
MHHHHHHGGSGVLPVFEPKGRVLLVDGHHLAYRNFFALKGLTTSLGEPVQGVYGFAKSLLKALKEDGDVVIVVFDAKAPSFRHEAYEAYKAGRAPTPEDFPRQLALMKELVDLLGLERLEVPGFEADDVLATLAKKAEREGYEVQILTADRDLFQLLSPRISVLHPEGHRITPEWLWEKYGLRPEQWVDFRALAGDPSDNIPGVKGIGEKTALKLLKEWGSLENLLKNLDQVKPESVREKILAHLEDLKLSRELSRVRTDLPLEVDFGRRREPDWEGLKAFLERLEFGSLLHEFGLLESPLLAEEAPWPPPEGAFLGYRLSRPEPMWAELLALAASAQGRVYRAEDPHGALRGLFEVRTLLAKDLAVVALREGLDLPPTDDPMLLAYLLDPSNTTPEGVARRYGGEWTEDAAKRALLAERLHENLLGRLQGEERLLWLYEEVEKPLSRVLAHMEATGVKLDVAYLENLSLEVAAHMRRLEEEVFRLAGRSFRLNSRDQLERVLFDELGLPPIGKTEKTGKRSTSAAVLEALREVHPIVDKILQYREMAKLKGTYIDRLPALVHPKTGRLHTRFNQTATATGRLSSSDPNLQNIPVRTPLGQKIRRAFVAEEGWALVALDYRQIELRVLAHLSGDENLIRVFQEGKDIHTQTASWMFGLSAEAIDPLMRRAAKTINFGVLYGMSAFRLSQELGIPYEEAQAFIQKYFQSYPKVKAWIEKTLREGRTRGYVETLFGRRRYVPDLNSRVKGKREAAERMAFNMPVQGTAADLMKLAMVRLFPQLREVGARMLLQVHDELLLEAPKERAEEVAALAKEVMEGVWPLAVPLEVEVGIGEDWLAAKG

SEQ ID NO: 6567 - DNA, 2523 bp, synthetic construct
  misc_feature 1..2523: note = Variant of DNA polymerase I from Thermus sp. strain 2.9
  source 1..2523: mol_type = other DNA
atgcaccatcatcatcatcatggcggtagcggcgtgttaccggtgttcgagcctaaaggtcgcgtgcttctggttgatggccatcatctcgcgtatcgtaacttctttgccctgaaaggattaaccaccagcctgggcgagccggtacagggtgtctacggctttgcaaagtcgctcctgaaagctctgaaagaagacggtgatgtggtgattgttgtctttgatgcgaaagcgccaagttttcgccacgaagcgtacgaagcttacaaagccgggcgtgctccaacgccggaagactttcctcgccaattggcgcttatgaaggaattagtggatttgcttggcctcgaacgcttggaagttcccggtttcgaggcagacgacgtattagcgactctcgcaaagaaagccgaacgtgagggctatgaagtccagatcttgacagcagatcgcgatcttttccagcttttatctccgcgcatctcggtgttacacccggaagggcatcgtatcaccccggaatggctctgggagaaatatggtttgcgtcccgaacaatgggtggattttcgcgccttagcaggcgatccgagcgacaatattccgggagttaaaggtatcggcgagaagacggcgctcaagctccttaaagaatgggggtcgttggagaacttgcttaagaatttagatcaggtcaaaccagagtcagtgcgtgagaagattcttgctcacctcgaagacctcaaattaagccgcgaattgtcccgtgtacgcaccgatttgccgctcgaagttgatttcggtcgccgccgcgaacctgactgggagggtcttaaagcgtttttagagcgtcttgaatttggttcgctcttgcatgaattcggccttttagaaagcccgttactggccgaagaagcaccttggccaccgcccgagggcgcgtttttaggttaccgtttgagtcgcccggaaccgatgtgggccgaattactggctcttgcagcgtctgcccagggacgtgtgtatcgcgcggaagaccctcatggtgcgctccgcggcctcttcgaagtccgtggactccttgccaaagacttagctgttgttgcattgcgcgaaggtcttgatttacctccgactgatgatccaatgcttcttgcgtacctcttggacccgtcaaacacgacgcccgaaggcgtagcccgtcgttacggcggcgagtggaccgaagatgcaggcaaacgcgcgttattggccgaacgtttgcacgaaaatttattaggacgtttgcaaggcgaggaacgtctcctctggctttacgaagaagtggagaaaccattgagtcgcgtgctcgcgcatatggaagctaccggtgtcaaattagacgtggcgtatttggagaatctcagccttgaagttgctgcccacatgcgccgcttggaggaagaagtattccgtttagcaggccgttcctttcgccttaactctcgcgatcagttagaacgtgtgttgttcgatgaacttggtctccctcctatcggcaagacagagaagaccggtaaacgtagcacttcagcggcggttttagaagctcttcgcgaagtccatcccattgtggacaagatcttgcagtaccgcgaaatggcgaaattgaaaggcacctatattgaccgtcttccggcattagtccacccgaaaacgggacgcctccatacccgcttcaaccaaacagccacggcgaccggtcgtttgtcctcctctgatccaaaccttcagaatattccagtacgtaccccattgggccagaagatccgccgtgcgtttgtagctgagaagggttggcgtttagtggccctcgattatcgtcaaattgaattacgtgtccttgcccatctttctggcgatgagaacctcatccgcgtgtttcaggaaggcaaagacattcacactcaaacggcaagctggatgtttggattatcagctgaagcgatcgatcctttgatgcgtcgtgcagcgaagaccatcaatttcggtgttctctacggtatgagtgcctttcgtttgtcgcaggaattaggcattccctatgaagaagctcaggcgttcattcagaaatactttcaaggctatcccaaagttaaagcatggatcgagaagactctccgtgaaggccgcacacgtggttacgtagagaccttatttggacgtcgccgctatgttcccgatttaaactcgcgcgtgaaaggcaagcgtgaagccgccgaacgcatggcgttcaacatgcctgtacagggcacggcagctgacctcatgaaacttgcaatggtgcgcctttttccacaattgcgtgaagttggtgcccgcatggatttgcaggtccacgatgaactcttgttagaagcgccaaaagagcgtgcggaagaggtggcagccctcgcgaaagaagttatggaaggcgtgtggcccttagcggtgcctcttgaagtcgaagttggtattggcgaggattggctggctgccaaagga

SEQ ID NO: 6568 - protein, 841 aa, synthetic construct
  REGION 1..841: note = Variant of DNA polymerase I from Thermus sp. strain 2.9
MHHHHHHGGSGVLPVFEPKGRVLLVDGHHLAYRNFFALKGLTTSLGEPVQGVYGFAKSLLKALKEDGDVVIVVFDAKAPSFRHEAYEAYKAGRAPTPEDFPRQLALMKELVDLLGLERLEVPGFEADDVLATLAKKAEREGYEVQILTADRDLFQLLSPRISVLHPEGHRITPEWLWEKYGLRPEQWVDFRALAGDPSDNIPGVKGIGEKTALKLLKEWGSLENLLKNLDQVKPESVREKILAHLEDLKLSRELSRVRTDLPLEVDFGRRREPDWEGLKAFLERLEFGSLLHEFGLLESPLLAEEAPWPPPEGAFLGYRLSRPEPMWAELLALAASAQGRVYRAEDPHGALRGLFEVRGLLAKDLAVVALREGLDLPPTDDPMLLAYLLDPSNTTPEGVARRYGGEWTEDAGKRALLAERLHENLLGRLQGEERLLWLYEEVEKPLSRVLAHMEATGVKLDVAYLENLSLEVAAHMRRLEEEVFRLAGRSFRLNSRDQLERVLFDELGLPPIGKTEKTGKRSTSAAVLEALREVHPIVDKILQYREMAKLKGTYIDRLPALVHPKTGRLHTRFNQTATATGRLSSSDPNLQNIPVRTPLGQKIRRAFVAEKGWRLVALDYRQIELRVLAHLSGDENLIRVFQEGKDIHTQTASWMFGLSAEAIDPLMRRAAKTINFGVLYGMSAFRLSQELGIPYEEAQAFIQKYFQGYPKVKAWIEKTLREGRTRGYVETLFGRRRYVPDLNSRVKGKREAAERMAFNMPVQGTAADLMKLAMVRLFPQLREVGARMDLQVHDELLLEAPKERAEEVAALAKEVMEGVWPLAVPLEVEVGIGEDWLAAKG

SEQ ID NO: 6569 - DNA, 2523 bp, synthetic construct
  misc_feature 1..2523: note = Variant of DNA polymerase I from Thermus sp. strain 2.9
  source 1..2523: mol_type = other DNA
atgcaccatcatcatcatcatggcggtagcggcgtgttaccggtgttcgagcctaaaggtcgcgtgcttctggttgatggccatcatctcgcgtatcgtaacttctttgccctgaaaggattaaccaccagcctgggcgagccggtacagggtgtctacggctttgcaaagtcgctcctgaaagctctgaaagaagacggtgatgtggtgattgttgtctttgatgcgaaagcgccaagttttcgccacgaagcgtacgaagcttacaaagccgggcgtgctccaacgccggaagactttcctcgccaattggcgcttatgaaggaattagtggatttgcttggcctcgaacgcttggaagttcccggtttcgaggcagacgacgtattagcgactctcgcaaagaaagccgaacgtgagggctatgaagtccagatcttgacagcagatcgcgatcttttccagcttttatctccgcgcatctcggtgttacacccggaagggcatcgtatcaccccggaatggctctgggagaaatatggtttgcgtcccgaacaatgggtggattttcgcgccttagcaggcgatccgagcgacaatattccgggagttaaaggtatcggcgagaagacggcgctcaagctccttaaagaatgggggtcgttggagaacttgcttaagaatttagatcaggtcaaaccagagtcagtgcgtgagaagattcttgctcacctcgaagacctcaaattaagccgcgaattgtcccgtgtacgcaccgatttgccgctcgaagttgatttcggtcgccgccgcgaacctgactgggagggtcttaaagcgtttttagagcgtcttgaatttggttcgctcttgcatgaattcggccttttagaaagcccgttactggccgaagaagcaccttggccaccgcccgagggcgcgtttttaggttaccgtttgagtcgcccggaaccgatgtgggccgaattactggctcttgcagcgtctgcccagggacgtgtgtatcgcgcggaagaccctcatggtgcgctccgcggcctcttcgaagtccgtggcctccttgccaaagacttagctgttgttgcattgcgcgaaggtcttgatttacctccgactgatgatccaatgcttcttgcgtacctcttggacccgtcaaacacgacgcccgaaggcgtagcccgtcgttacggcggcgagtggaccgaagatgcaggcaaacgcgcgttattggccgaacgtttgcacgaaaatttattaggacgtttgcaaggcgaggcgcgtctcctgtggctttacgaagaagtggagaaaccattgagtcgcgtgctcgcgcatatggaagctaccggtgtcaaattagacgtggcgtatttggagaatctcagccttgaagttgctgcccacatgcgccgcttggaggaagaagtattccgtttagcaggccgttcctttcgccttaactctcgcgatcagttagaacgtgtgttgttcgatgaacttggtctccctcctatcggcaagacagagaagaccggtaaacgtagcacttcagcggcggttttagaagctcttcgcgaagtccatcccattgtggacaagatcttgcagtaccgcgaaatggcgaaattgaaaggcacctatattgaccgtcttccggcattagtccacccgaaaacgggacgcctccatacccgcttcaaccaaacagccacggcgaccggtcgtttgtcctcctctgatccaaaccttcagaatattccagtacgtaccccattgggccagaagatccgccgtgcgtttgtagctgaggagggttgggcgttagtggccctcgattatcgtcaaattgaattacgtgtccttgcccatctttctggcgatgagaacctcatccgcgtgtttcaggaaggcaaagacattcacactcaaacggcaagctggatgtttggattatcagctgaagcgatcgatcctttgatgcgtcgtgcagcgaagaccatcaatttcggtgttctctacggtatgagtgcctttcgtttgtcgcaggaattaggcattccctatgaagaagctcaggcgttcattcagaaatactttcaaagctatcccaaagttaaagcatggatcgagaagactctccgtgaaggccgcacacgtggttacgtagagaccttatttggacgtcgccgctatgttcccgatttaaacgctcgcgtgaaaggcaagcgtgaagccgccgaacgcatggcgttcaacatgcctgtacagggcacggcagctgacctcatgaaacttgcaatggtgcgcctttttccacaattgcgtgaagttggtgcccgcatgctgttgcaggtccacgatgaactcttgttagaagcgccaaaagagcgtgcggaagaggtggcagccctcgcgaaagaagttatggaaggcgtgtggcccttagcggtgcctcttgaagtcgaagttggtattggcgaggattggctggctgccaaagga

SEQ ID NO: 6570 - protein, 841 aa, synthetic construct
  REGION 1..841: note = Variant of DNA polymerase I from Thermus sp. strain 2.9
MHHHHHHGGSGVLPVFEPKGRVLLVDGHHLAYRNFFALKGLTTSLGEPVQGVYGFAKSLLKALKEDGDVVIVVFDAKAPSFRHEAYEAYKAGRAPTPEDFPRQLALMKELVDLLGLERLEVPGFEADDVLATLAKKAEREGYEVQILTADRDLFQLLSPRISVLHPEGHRITPEWLWEKYGLRPEQWVDFRALAGDPSDNIPGVKGIGEKTALKLLKEWGSLENLLKNLDQVKPESVREKILAHLEDLKLSRELSRVRTDLPLEVDFGRRREPDWEGLKAFLERLEFGSLLHEFGLLESPLLAEEAPWPPPEGAFLGYRLSRPEPMWAELLALAASAQGRVYRAEDPHGALRGLFEVRGLLAKDLAVVALREGLDLPPTDDPMLLAYLLDPSNTTPEGVARRYGGEWTEDAGKRALLAERLHENLLGRLQGEARLLWLYEEVEKPLSRVLAHMEATGVKLDVAYLENLSLEVAAHMRRLEEEVFRLAGRSFRLNSRDQLERVLFDELGLPPIGKTEKTGKRSTSAAVLEALREVHPIVDKILQYREMAKLKGTYIDRLPALVHPKTGRLHTRFNQTATATGRLSSSDPNLQNIPVRTPLGQKIRRAFVAEEGWALVALDYRQIELRVLAHLSGDENLIRVFQEGKDIHTQTASWMFGLSAEAIDPLMRRAAKTINFGVLYGMSAFRLSQELGIPYEEAQAFIQKYFQSYPKVKAWIEKTLREGRTRGYVETLFGRRRYVPDLNARVKGKREAAERMAFNMPVQGTAADLMKLAMVRLFPQLREVGARMLLQVHDELLLEAPKERAEEVAALAKEVMEGVWPLAVPLEVEVGIGEDWLAAKG

SEQ ID NO: 6571 - DNA, 2523 bp, synthetic construct
  misc_feature 1..2523: note = Variant of DNA polymerase I from Thermus sp. strain 2.9
  source 1..2523: mol_type = other DNA
atgcaccatcatcatcatcatggcggtagcggcgtgttaccggtgttcgagcctaaaggtcgcgtgcttctggttgatggccatcatctcgcgtatcgtaacttctttgccctgaaaggattaaccaccagcctgggcgagccggtacagggtgtctacggctttgcaaagtcgctcctgaaagctctgaaagaagacggtgatgtggtgattgttgtctttgatgcgaaagcgccaagttttcgccacgaagcgtacgaagcttacaaagccgggcgtgctccaacgccggaagactttcctcgccaattggcgcttatgaaggaattagtggatttgcttggcctcgaacgcttggaagttcccggtttcgaggcagacgacgtattagcgactctcgcaaagaaagccgaacgtgagggctatgaagtccagatcttgacagcagatcgcgatcttttccagcttttatctccgcgcatctcggtgttacacccggaagggcatcgtatcaccccggaatggctctgggagaaatatggtttgcgtcccgaacaatgggtggattttcgcgccttagcaggcgatccgagcgacaatattccgggagttaaaggtatcggcgagaagacggcgctcaagctccttaaagaatgggggtcgttggagaacttgcttaagaatttagatcaggtcaaaccagagtcagtgcgtgagaagattcttgctcacctcgaagacctcaaattaagccgcgaattgtcccgtgtacgcaccgatttgccgctcgaagttgatttcggtcgccgccgcgaacctgactgggagggtcttaaagcgtttttagagcgtcttgaatttggttcgctcttgcatgaattcggccttttagaaagcccgttactggccgaagaagcaccttggccaccgcccgagggcgcgtttttaggttaccgtttgagtcgcccggaaccgatgtgggccgaattactggctcttgcagcgtctgcccagggacgtgtgtatcgcgcggaagaccctcatggtgcgctccgcggcctcttcgaagtccgtggactccttgccaaagacttagctgttgttgcattgcgcgaaggtcttgatttacctccgactgatgatccaatgcttcttgcgtacctcttggacccgtcaaacacgacgcccgaaggcgtagcccgtcgttacggcggcgagtggtgggaagatgcagccaaacgcgcgttattggccgaacgtttgcacgaaaatttattaggacgtttgcaaggcgaggcgcgtctccgttggctttacgaagaagtggagaaaccattgagtcgcgtgctcgcgcatatggaagctaccggtgtcaaattagacgtggcgtatttggagaatctcagccttgaagttgctgcccacatgcgccgcttggaggaagaagtattccgtttagcaggccgttcctttcgccttaactctcgcgatcagttagaacgtgtgttgttcgatgaacttggtctccctcctatcggcaagacagagaagaccggtaaacgtagcacttcagcggcggttttagaagctcttcgcgaagtccatcccattgtggacaagatcttgcagtaccgcgaaatggcgaaattgaaaggcacctatattgaccgtcttccggcattagtccacccgaaaacgggacgcctccatacccgcttcaaccaaacagccacggcgaccggtcgtttgtcctcctctgatccaaaccttcagaatattccagtacgtaccccattgggccagaagatccgccgtgcgtttgtagctgagccgggttggcgtttagtggccctcgattatcgtcaaattgaattacgtgtccttgcccatctttctggcgatgagaacctcatccgcgtgtttcaggaaggcaaagacattcacactcaaacggcaagctggatgtttggattatcagctgaagcgatcgatcctttgatgcgtcgtgcagcgaagaccatcaatttcggtgttctctacggtatgagtgcctttcgtttgtcgcaggaattaggcattccctatgaagaagctcaggcgttcattcagaaatactttcaaagctatcccaaagttaaagcatggatcgagaagactctccgtgaaggccgcacacgtggttacgtagagaccttatttggacgtcgccgctatgttcccgatttaaacggtcgcgtgaaaggcaagcgtgaagccgccgaacgcatggcgttcaacatgcctgtacagggcacggcagctgacctcatgaaacttgcaatggtgcgcctttttccacaattgcgtgaagttggtgcccgcatgctgttgcaggtccacgatgaactcttgttagaagcgccaaaagagcgtgcggaagaggtggcagccctcgcgaaagaagttatggaaggcgtgtggcccttagcggtgcctcttgaagtcgaagttggtattggcgaggattggctggctgccaaagga

SEQ ID NO: 6572 - protein, 841 aa, synthetic construct
  REGION 1..841: note = Variant of DNA polymerase I from Thermus sp. strain 2.9
MHHHHHHGGSGVLPVFEPKGRVLLVDGHHLAYRNFFALKGLTTSLGEPVQGVYGFAKSLLKALKEDGDVVIVVFDAKAPSFRHEAYEAYKAGRAPTPEDFPRQLALMKELVDLLGLERLEVPGFEADDVLATLAKKAEREGYEVQILTADRDLFQLLSPRISVLHPEGHRITPEWLWEKYGLRPEQWVDFRALAGDPSDNIPGVKGIGEKTALKLLKEWGSLENLLKNLDQVKPESVREKILAHLEDLKLSRELSRVRTDLPLEVDFGRRREPDWEGLKAFLERLEFGSLLHEFGLLESPLLAEEAPWPPPEGAFLGYRLSRPEPMWAELLALAASAQGRVYRAEDPHGALRGLFEVRGLLAKDLAVVALREGLDLPPTDDPMLLAYLLDPSNTTPEGVARRYGGEWWEDAAKRALLAERLHENLLGRLQGEARLRWLYEEVEKPLSRVLAHMEATGVKLDVAYLENLSLEVAAHMRRLEEEVFRLAGRSFRLNSRDQLERVLFDELGLPPIGKTEKTGKRSTSAAVLEALREVHPIVDKILQYREMAKLKGTYIDRLPALVHPKTGRLHTRFNQTATATGRLSSSDPNLQNIPVRTPLGQKIRRAFVAEPGWRLVALDYRQIELRVLAHLSGDENLIRVFQEGKDIHTQTASWMFGLSAEAIDPLMRRAAKTINFGVLYGMSAFRLSQELGIPYEEAQAFIQKYFQSYPKVKAWIEKTLREGRTRGYVETLFGRRRYVPDLNGRVKGKREAAERMAFNMPVQGTAADLMKLAMVRLFPQLREVGARMLLQVHDELLLEAPKERAEEVAALAKEVMEGVWPLAVPLEVEVGIGEDWLAAKG

SEQ ID NO: 6573 - DNA, 2523 bp, synthetic construct
  misc_feature 1..2523: note = Variant of DNA polymerase I from Thermus sp. strain 2.9
  source 1..2523: mol_type = other DNA
atgcaccatcatcatcatcatggcggtagcggcgtgttaccggtgttcgagcctaaaggtcgcgtgcttctggttgatggccatcatctcgcgtatcgtaacttctttgccctgaaaggattaaccaccagcctgggcgagccggtacagggtgtctacggctttgcaaagtcgctcctgaaagctctgaaagaagacggtgatgtggtgattgttgtctttgatgcgaaagcgccaagttttcgccacgaagcgtacgaagcttacaaagccgggcgtgctccaacgccggaagactttcctcgccaattggcgcttatgaaggaattagtggatttgcttggcctcgaacgcttggaagttcccggtttcgaggcagacgacgtattagcgactctcgcaaagaaagccgaacgtgagggctatgaagtccagatcttgacagcagatcgcgatcttttccagcttttatctccgcgcatctcggtgttacacccggaagggcatcgtatcaccccggaatggctctgggagaaatatggtttgcgtcccgaacaatgggtggattttcgcgccttagcaggcgatccgagcgacaatattccgggagttaaaggtatcggcgagaagacggcgctcaagctccttaaagaatgggggtcgttggagaacttgcttaagaatttagatcaggtcaaaccagagtcagtgcgtgagaagattcttgctcacctcgaagacctcaaattaagccgcgaattgtcccgtgtacgcaccgatttgccgctcgaagttgatttcggtcgccgccgcgaacctgactgggagggtcttaaagcgtttttagagcgtcttgaatttggttcgctcttgcatgaattcggccttttagaaagcccgttactggccgaagaagcaccttggccaccgcccgagggcgcgtttttaggttaccgtttgagtcgcccggaaccgatgtgggccgaattactggctcttgcagcgtctgcccagggacgtgtgtatcgcgcggaagaccctcatggtgcgctccgcggcctcttcgaagtccgtggactccttgccaaagacttagctgttgttgcattgcgcgaaggtcttgatttacctccgactgatgatccaatgcttcttgcgtacctcttggacccgtcaaacacgacgcccgaaggcgtagcccgtcgttacggcggcgagtggaccgaagatgcagccaaacgcgcgttattggccgaacgtttgcacgaaaatttattaggacgtttgcaaggcgaggcgcgtctccgttggctttacgaagaagtggagaaaccattgagtcgcgtgctcgcgcatatggaagctaccggtgtcaaattagacgtggcgtatttggagaatctcagccttgaagttgctgcccacatgcgccgcttggaggaagaagtattccgtttagcaggccgttcctttcgccttaactctcgcgatcagttagaacgtgtgttgttcgatgaacttggtctccctcctatcggcaagacagagaagaccggtaaacgtagcacttcagcggcggttttagaagctcttcgcgaagtccatcccattgtggacaagatcttgcagtaccgcgaaatggcgaaattgaaaggcacctatattgaccgtcttccggcattagtccacccgaaaacgggacgcctccatacccgcttcaaccaaacagccacggcgaccggtcgtttgtcctcctctgatccaaaccttcagaatattccagtacgtaccccattgggccagaagatccgccgtgcgtttgtagctgagccgggttggcgtttagtggccctcgattatcgtcaaattgaattacgtgtccttgcccatctttctggcgatgagaacctcatccgcgtgtttcaggaaggcaaagacattcacactcaaacggcaagctggatgtttggattatcagctgaagcgatcgatcctttgatgcgtcgtgcagcgaagaccatcaatttcggtgttctctacggtatgagtgcctttcgtttgtcgcaggaattaggcattccctatgaagaagctcaggctttcattcagaaatactttcaaagctatcccaaagttaaagcatggatcgagaagactctccgtgaaggccgcacacgtggttacgtagagaccttatttggacgtcgccgctatgttcccgatttaaactcgcgcgtgaaaggcaagcgtgaagccgccgaacgcatggcgttcaacatgcctgtacagggcacggcagctgacctcatgaaacttgcaatggtgcgcctttttccacaattgcgtgaagttggtgcccgcatgctgttgcaggtccacgatgaactcttgttagaagcgccaaaagagcgtgcggaagaggtggcagccctcgcgaaagaagttatggaaggcgtgtggcccttagcggtgcctcttgaagtcgaagttggtattggcgaggattggctggctgccaaagga

SEQ ID NO: 6574 - protein, 841 aa, synthetic construct
  REGION 1..841: note = Variant of DNA polymerase I from Thermus sp. strain 2.9
MHHHHHHGGSGVLPVFEPKGRVLLVDGHHLAYRNFFALKGLTTSLGEPVQGVYGFAKSLLKALKEDGDVVIVVFDAKAPSFRHEAYEAYKAGRAPTPEDFPRQLALMKELVDLLGLERLEVPGFEADDVLATLAKKAEREGYEVQILTADRDLFQLLSPRISVLHPEGHRITPEWLWEKYGLRPEQWVDFRALAGDPSDNIPGVKGIGEKTALKLLKEWGSLENLLKNLDQVKPESVREKILAHLEDLKLSRELSRVRTDLPLEVDFGRRREPDWEGLKAFLERLEFGSLLHEFGLLESPLLAEEAPWPPPEGAFLGYRLSRPEPMWAELLALAASAQGRVYRAEDPHGALRGLFEVRGLLAKDLAVVALREGLDLPPTDDPMLLAYLLDPSNTTPEGVARRYGGEWTEDAAKRALLAERLHENLLGRLQGEARLRWLYEEVEKPLSRVLAHMEATGVKLDVAYLENLSLEVAAHMRRLEEEVFRLAGRSFRLNSRDQLERVLFDELGLPPIGKTEKTGKRSTSAAVLEALREVHPIVDKILQYREMAKLKGTYIDRLPALVHPKTGRLHTRFNQTATATGRLSSSDPNLQNIPVRTPLGQKIRRAFVAEPGWRLVALDYRQIELRVLAHLSGDENLIRVFQEGKDIHTQTASWMFGLSAEAIDPLMRRAAKTINFGVLYGMSAFRLSQELGIPYEEAQAFIQKYFQSYPKVKAWIEKTLREGRTRGYVETLFGRRRYVPDLNSRVKGKREAAERMAFNMPVQGTAADLMKLAMVRLFPQLREVGARMLLQVHDELLLEAPKERAEEVAALAKEVMEGVWPLAVPLEVEVGIGEDWLAAKG

SEQ ID NO: 6575 - DNA, 2523 bp, synthetic construct
  misc_feature 1..2523: note = Variant of DNA polymerase I from Thermus sp. strain 2.9
  source 1..2523: mol_type = other DNA
atgcaccatcatcatcatcatggcggtagcggcgtgttaccggtgttcgagcctaaaggtcgcgtgcttctggttgatggccatcatctcgcgtatcgtaacttctttgccctgaaaggattaaccaccagcctgggcgagccggtacagggtgtctacggctttgcaaagtcgctcctgaaagctctgaaagaagacggtgatgtggtgattgttgtctttgatgcgaaagcgccaagttttcgccacgaagcgtacgaagcttacaaagccgggcgtgctccaacgccggaagactttcctcgccaattggcgcttatgaaggaattagtggatttgcttggcctcgaacgcttggaagttcccggtttcgaggcagacgacgtattagcgactctcgcaaagaaagccgaacgtgagggctatgaagtccagatcttgacagcagatcgcgatcttttccagcttttatctccgcgcatctcggtgttacacccggaagggcatcgtatcaccccggaatggctctgggagaaatatggtttgcgtcccgaacaatgggtggattttcgcgccttagcaggcgatccgagcgacaatattccgggagttaaaggtatcggcgagaagacggcgctcaagctccttaaagaatgggggtcgttggagaacttgcttaagaatttagatcaggtcaaaccagagtcagtgcgtgagaagattcttgctcacctcgaagacctcaaattaagccgcgaattgtcccgtgtacgcaccgatttgccgctcgaagttgatttcggtcgccgccgcgaacctgactgggagggtcttaaagcgtttttagagcgtcttgaatttggttcgctcttgcatgaattcggccttttagaaagcccgttactggccgaagaagcaccttggccaccgcccgagggcgcgtttttaggttaccgtttgagtcgcccggaaccgatgtgggccgaattactggctcttgcagcgtctgcccagggacgtgtgtatcgcgcggaagaccctcatggtgcgctccgcggcctcttcgaagtccgtggcctccttgccaaagacttagctgttgttgcattgcgcgaaggtcttgatttacctccgactgatgatccaatgcttcttgcgtacctcttggacccgtcaaacacgacgcccgaaggcgtagcccgtcgttacggcggcgagtggaccgaagatgcagccaaacgcgcgttattggccgaacgtttgcacgaaaatttattaggacgtttgcaaggcgaggaacgtctcctctggctttacgaagaagtggagaaaccattgagtcgcgtgctcgcgcatatggaagctaccggtgtcaaattagacgtggcgtatttggagaatctcagccttgaagttgctgcccacatgcgccgcttggaggaagaagtattccgtttagcaggccgttcctttcgccttaactctcgcgatcagttagaacgtgtgttgttcgatgaacttggtctccctcctatcggcaagacagagaagaccggtaaacgtagcacttcagcggcggttttagaagctcttcgcgaagtccatcccattgtggacaagatcttgcagtaccgcgaaatggcgaaattgaaaggcacctatattgaccgtcttccggcattagtccacccgaaaacgggacgcctccatacccgcttcaaccaaacagccacggcgaccggtcgtttgtcctcctctgatccaaaccttcagaatattccagtacgtaccccattgggccagaagatccgccgtgcgtttgtagctgaggagggttgggcgttagtggccctcgattatcgtcaaattgaattacgtgtccttgcccatctttctggcgatgagaacctcatccgcgtgtttcaggaaggcaaagacattcacactcaaacggcaagctggatgtttggattatcagctgaagcgatcgatcctttgatgcgtcgtgcagcgaagaccatcaatttcggtgttctctacggtatgagtgcctttcgtttgtcgcaggaattaggcattcccctggaagaagctcagggtttcattcagaaatactttcaaagctatcccaaagttaaagcatggatcgagaagactctccgtgaaggccgcacacgtggttacgtagagaccttatttggacgtcgccgctatgttcccgatttaaacggtcgcgtgaaaggcaagcgtgaagccgccgaacgcatggcgttcaacatgcctgtacagggcacggcagctgacctcatgaaacttgcaatggtgcgcctttttccacaattgcgtgaagttggtgcccgcatgctgttgcaggtccacgatgaactcttgttagaagcgccaaaagagcgtgcggaagaggtggcagccctcgcgaaagaagttatggaaggcgtgtggcccttagcggtgcctcttgaagtcgaagttggtattggcgaggattggctggctgccaaagga

SEQ ID NO: 6576 - protein, 841 aa, synthetic construct
  REGION 1..841: note = Variant of DNA polymerase I from Thermus sp. strain 2.9
MHHHHHHGGSGVLPVFEPKGRVLLVDGHHLAYRNFFALKGLTTSLGEPVQGVYGFAKSLLKALKEDGDVVIVVFDAKAPSFRHEAYEAYKAGRAPTPEDFPRQLALMKELVDLLGLERLEVPGFEADDVLATLAKKAEREGYEVQILTADRDLFQLLSPRISVLHPEGHRITPEWLWEKYGLRPEQWVDFRALAGDPSDNIPGVKGIGEKTALKLLKEWGSLENLLKNLDQVKPESVREKILAHLEDLKLSRELSRVRTDLPLEVDFGRRREPDWEGLKAFLERLEFGSLLHEFGLLESPLLAEEAPWPPPEGAFLGYRLSRPEPMWAELLALAASAQGRVYRAEDPHGALRGLFEVRGLLAKDLAVVALREGLDLPPTDDPMLLAYLLDPSNTTPEGVARRYGGEWTEDAAKRALLAERLHENLLGRLQGEERLLWLYEEVEKPLSRVLAHMEATGVKLDVAYLENLSLEVAAHMRRLEEEVFRLAGRSFRLNSRDQLERVLFDELGLPPIGKTEKTGKRSTSAAVLEALREVHPIVDKILQYREMAKLKGTYIDRLPALVHPKTGRLHTRFNQTATATGRLSSSDPNLQNIPVRTPLGQKIRRAFVAEEGWALVALDYRQIELRVLAHLSGDENLIRVFQEGKDIHTQTASWMFGLSAEAIDPLMRRAAKTINFGVLYGMSAFRLSQELGIPLEEAQGFIQKYFQSYPKVKAWIEKTLREGRTRGYVETLFGRRRYVPDLNGRVKGKREAAERMAFNMPVQGTAADLMKLAMVRLFPQLREVGARMLLQVHDELLLEAPKERAEEVAALAKEVMEGVWPLAVPLEVEVGIGEDWLAAKG

SEQ ID NO: 6577 - DNA, 2523 bp, synthetic construct; identical to SEQ ID NO: 5155
  misc_feature 1..2523: note = Variant of DNA polymerase I from Thermus sp. strain 2.9
  source 1..2523: mol_type = other DNA

SEQ ID NO: 6578 - protein, 841 aa, synthetic construct; identical to SEQ ID NO: 5156
  REGION 1..841: note = Variant of DNA polymerase I from Thermus sp. strain 2.9

SEQ ID NO: 6579 - DNA, 2523 bp, synthetic construct
  misc_feature 1..2523: note = Variant of DNA polymerase I from Thermus sp. strain 2.9
  source 1..2523: mol_type = other DNA
atgcaccatcatcatcatcatggcggtagcggcgtgttaccggtgttcgagcctaaaggtcgcgtgcttctggttgatggccatcatctcgcgtatcgtaacttctttgccctgaaaggattaaccaccagcctgggcgagccggtacagggtgtctacggctttgcaaagtcgctcctgaaagctctgaaagaagacggtgatgtggtgattgttgtctttgatgcgaaagcgccaagttttcgccacgaagcgtacgaagcttacaaagccgggcgtgctccaacgccggaagactttcctcgccaattggcgcttatgaaggaattagtggatttgcttggcctcgaacgcttggaagttcccggtttcgaggcagacgacgtattagcgactctcgcaaagaaagccgaacgtgagggctatgaagtccagatcttgacagcagatcgcgatcttttccagcttttatctccgcgcatctcggtgttacacccggaagggcatcgtatcaccccggaatggctctgggagaaatatggtttgcgtcccgaacaatgggtggattttcgcgccttagcaggcgatccgagcgacaatattccgggagttaaaggtatcggcgagaagacggcgctcaagctccttaaagaatgggggtcgttggagaacttgcttaagaatttagatcaggtcaaaccagagtcagtgcgtgagaagattcttgctcacctcgaagacctcaaattaagccgcgaattgtcccgtgtacgcaccgatttgccgctcgaagttgatttcggtcgccgccgcgaacctgactgggagggtcttaaagcgtttttagagcgtcttgaatttggttcgctcttgcatgaattcggccttttagaaagcccgttactggccgaagaagcaccttggccaccgcccgagggcgcgtttttaggttaccgtttgagtcgcccggaaccgatgtgggccgaattactggctcttgcagcgtctgcccagggacgtgtgtatcgcgcggaagaccctcatggtgcgctccgcggcctcttcgaagtccgtaccctccttgccaaagacttagctgttgttgcattgcgcgaaggtcttgatttacctccgactgatgatccaatgcttcttgcgtacctcttggacccgtcaaacacgacgcccgaaggcgtagcccgtcgttacggcggcgagtggaccgaagatgcagccaaacgcgcgttattggccgaacgtttgcacgaaaatttattaggacgtttgcaaggcgaggaacgtctcctctggctttacgaagaagtggagaaaccattgagtcgcgtgctcgcgcatatggaagctaccggtgtcaaattagacgtggcgtatttggagaatctcagccttgaagttgctgcccacatgcgccgcttggaggaagaagtattccgtttagcaggccgttcctttcgccttaactctcgcgatcagttagaacgtgtgttgttcgatgaacttggtctccctcctatcggcaagacagagaagaccggtaaacgtagcacttcagcggcggttttagaagctcttcgcgaagtccatcccattgtggacaagatcttgcagtaccgcgaaatggcgaaattgaaaggcacctatattgaccgtcttccggcattagtccacccgaaaacgggacgcctccatacccgcttcaaccaaacagccacggcgaccggtcgtttgtcctcctctgatccaaaccttcagaatattccagtacgtacctttttgggccagaagatccgccgtgcgtttgtagctgagaagggttgggcgttagtggccctcgattatcgtcaaattgaattacgtgtccttgcccatctttctggcgatgagaacctcatccgcgtgtttcaggaaggcaaagacattcacactcaaacggcaagctggatgtttggattatcagctgaagcgatcgatcctttgatgcgtcgtgcagcgaagaccatcaatttcggtgttctctacggtatgagtgcctttcgtttgtcgcaggaattaggcattcccctggaagaagctcaggctttcattcagaaatactttcaaggctatcccaaagttaaagcatggatcgagaagactctccgtgaaggccgcacacgtggttacgtagagaccttatttggacgtcgccgctatgttcccgatttaaacgctcgcgtgaaaggcaagcgtgaagccgccgaacgcatggcgttcaacatgcctgtacagggcacggcagctgacctcatgaaacttgcaatggtgcgcctttttccacaattgcgtgaagttggtgcccgcatgctgttgcaggtccacgatgaactcttgttagaagcgccaaaagagcgtgcggaagaggtggcagccctcgcgaaagaagttatggaaggcgtgtggcccttagcggtgcctcttgaagtcgaagttggtattggcgaggattggctggctgccaaagga

SEQ ID NO: 6580 - protein, 841 aa, synthetic construct
  REGION 1..841: note = Variant of DNA polymerase I from Thermus sp. strain 2.9
MHHHHHHGGSGVLPVFEPKGRVLLVDGHHLAYRNFFALKGLTTSLGEPVQGVYGFAKSLLKALKEDGDVVIVVFDAKAPSFRHEAYEAYKAGRAPTPEDFPRQLALMKELVDLLGLERLEVPGFEADDVLATLAKKAEREGYEVQILTADRDLFQLLSPRISVLHPEGHRITPEWLWEKYGLRPEQWVDFRALAGDPSDNIPGVKGIGEKTALKLLKEWGSLENLLKNLDQVKPESVREKILAHLEDLKLSRELSRVRTDLPLEVDFGRRREPDWEGLKAFLERLEFGSLLHEFGLLESPLLAEEAPWPPPEGAFLGYRLSRPEPMWAELLALAASAQGRVYRAEDPHGALRGLFEVRTLLAKDLAVVALREGLDLPPTDDPMLLAYLLDPSNTTPEGVARRYGGEWTEDAAKRALLAERLHENLLGRLQGEERLLWLYEEVEKPLSRVLAHMEATGVKLDVAYLENLSLEVAAHMRRLEEEVFRLAGRSFRLNSRDQLERVLFDELGLPPIGKTEKTGKRSTSAAVLEALREVHPIVDKILQYREMAKLKGTYIDRLPALVHPKTGRLHTRFNQTATATGRLSSSDPNLQNIPVRTFLGQKIRRAFVAEKGWALVALDYRQIELRVLAHLSGDENLIRVFQEGKDIHTQTASWMFGLSAEAIDPLMRRAAKTINFGVLYGMSAFRLSQELGIPLEEAQAFIQKYFQGYPKVKAWIEKTLREGRTRGYVETLFGRRRYVPDLNARVKGKREAAERMAFNMPVQGTAADLMKLAMVRLFPQLREVGARMLLQVHDELLLEAPKERAEEVAALAKEVMEGVWPLAVPLEVEVGIGEDWLAAKG

SEQ ID NO: 6581 - DNA, 2523 bp, synthetic construct
  misc_feature 1..2523: note = Variant of DNA polymerase I from Thermus sp. strain 2.9
  source 1..2523: mol_type = other DNA
atgcaccatcatcatcatcatggcggtagcggcgtgttaccggtgttcgagcctaaaggtcgcgtgcttctggttgatggccatcatctcgcgtatcgtaacttctttgccctgaaaggattaaccaccagcctgggcgagccggtacagggtgtctacggctttgcaaagtcgctcctgaaagctctgaaagaagacggtgatgtggtgattgttgtctttgatgcgaaagcgccaagttttcgccacgaagcgtacgaagcttacaaagccgggcgtgctccaacgccggaagactttcctcgccaattggcgcttatgaaggaattagtggatttgcttggcctcgaacgcttggaagttcccggtttcgaggcagacgacgtattagcgactctcgcaaagaaagccgaacgtgagggctatgaagtccagatcttgacagcagatcgcgatcttttccagcttttatctccgcgcatctcggtgttacacccggaagggcatcgtatcaccccggaatggctctgggagaaatatggtttgcgtcccgaacaatgggtggattttcgcgccttagcaggcgatccgagcgacaatattccgggagttaaaggtatcggcgagaagacggcgctcaagctccttaaagaatgggggtcgttggagaacttgcttaagaatttagatcaggtcaaaccagagtcagtgcgtgagaagattcttgctcacctcgaagacctcaaattaagccgcgaattgtcccgtgtacgcaccgatttgccgctcgaagttgatttcggtcgccgccgcgaacctgactgggagggtcttaaagcgtttttagagcgtcttgaatttggttcgctcttgcatgaattcggccttttagaaagcccgttactggccgaagaagcaccttggccaccgcccgagggcgcgtttttaggttaccgtttgagtcgcccggaaccgatgtgggccgaattactggctcttgcagcgtctgcccagggacgtgtgtatcgcgcggaagaccctcatggtgcgctccgcggcctcttcgaagtccgtggcctccttgccaaagacttagctgttgttgcattgcgcgaaggtcttgatttacctccgactgatgatccaatgcttcttgcgtacctcttggacccgtcaaacacgacgcccgaaggcgtagcccgtcgttacggcggcgagtggaccgaagatgcagccaaacgcgcgttattggccgaacgtttgcacgaaaatttattaggacgtttgcaaggcgaggagcgtctccgttggctttacgaagaagtggagaaaccattgagtcgcgtgctcgcgcatatggaagctaccggtgtcaaattagacgtggcgtatttggagaatctcagccttgaagttgctgcccacatgcgccgcttggaggaagaagtattccgtttagcaggccgttcctttcgccttaactctcgcgatcagttagaacgtgtgttgttcgatgaacttggtctccctcctatcggcaagacagagaagaccggtaaacgtagcacttcagcggcggttttagaagctcttcgcgaagtccatcccattgtggacaagatcttgcagtaccgcgaaatggcgaaattgaaaggcacctatattgaccgtcttccggcattagtccacccgaaaacgggacgcctccatacccgcttcaaccaaacagccacggcgaccggtcgtttgtcctcctctgatccaaaccttcagaatattccagtacgtacctttttgggccagaagatccgccgtgcgtttgtagctgaggagggttggcgtttagtggccctcgattatcgtcaaattgaattacgtgtccttgcccatctttctggcgatgagaacctcatccgcgtgtttcaggaaggcaaagacattcacactcaaacggcaagctggatgtttggattatcagctgaagcgatcgatcctttgatgcgtcgtgcagcgaagaccatcaatttcggtgttctctacggtatgagtgcctttcgtttgtcgcaggaattaggcattcccctggaagaagctcaggctttcattcagaaatactttcaaagctatcccaaagttaaagcatggatcgagaagactctccgtgaaggccgcacacgtggttacgtagagaccttatttggacgtcgccgctatgttcccgatttaaacggtcgcgtgaaaggcaagcgtgaagccgccgaacgcatggcgttcaacatgcctgtacagggcacggcagctgacctcatgaaacttgcaatggtgcgcctttttccacaattgcgtgaagttggtgcccgcatgctgttgcaggtccacgatgaactcttgttagaagcgccaaaagagcgtgcggaagaggtggcagccctcgcgaaagaagttatggaaggcgtgtggcccttagcggtgcctcttgaagtcgaagttggtattggcgaggattggctggctgccaaagga

SEQ ID NO: 6582 - protein, 841 aa, synthetic construct
  REGION 1..841: note = Variant of DNA polymerase I from Thermus sp. strain 2.9
MHHHHHHGGSGVLPVFEPKGRVLLVDGHHLAYRNFFALKGLTTSLGEPVQGVYGFAKSLLKALKEDGDVVIVVFDAKAPSFRHEAYEAYKAGRAPTPEDFPRQLALMKELVDLLGLERLEVPGFEADDVLATLAKKAEREGYEVQILTADRDLFQLLSPRISVLHPEGHRITPEWLWEKYGLRPEQWVDFRALAGDPSDNIPGVKGIGEKTALKLLKEWGSLENLLKNLDQVKPESVREKILAHLEDLKLSRELSRVRTDLPLEVDFGRRREPDWEGLKAFLERLEFGSLLHEFGLLESPLLAEEAPWPPPEGAFLGYRLSRPEPMWAELLALAASAQGRVYRAEDPHGALRGLFEVRGLLAKDLAVVALREGLDLPPTDDPMLLAYLLDPSNTTPEGVARRYGGEWTEDAAKRALLAERLHENLLGRLQGEERLRWLYEEVEKPLSRVLAHMEATGVKLDVAYLENLSLEVAAHMRRLEEEVFRLAGRSFRLNSRDQLERVLFDELGLPPIGKTEKTGKRSTSAAVLEALREVHPIVDKILQYREMAKLKGTYIDRLPALVHPKTGRLHTRFNQTATATGRLSSSDPNLQNIPVRTFLGQKIRRAFVAEEGWRLVALDYRQIELRVLAHLSGDENLIRVFQEGKDIHTQTASWMFGLSAEAIDPLMRRAAKTINFGVLYGMSAFRLSQELGIPLEEAQAFIQKYFQSYPKVKAWIEKTLREGRTRGYVETLFGRRRYVPDLNGRVKGKREAAERMAFNMPVQGTAADLMKLAMVRLFPQLREVGARMLLQVHDELLLEAPKERAEEVAALAKEVMEGVWPLAVPLEVEVGIGEDWLAAKG

SEQ ID NO: 6583 - DNA, 2523 bp, synthetic construct
  misc_feature 1..2523: note = Variant of DNA polymerase I from Thermus sp. strain 2.9
  source 1..2523: mol_type = other DNA
atgcaccatcatcatcatcatggcggtagcggcgtgttaccggtgttcgagcctaaaggtcgcgtgcttctggttgatggccatcatctcgcgtatcgtaacttctttgccctgaaaggattaaccaccagcctgggcgagccggtacagggtgtctacggctttgcaaagtcgctcctgaaagctctgaaagaagacggtgatgtggtgattgttgtctttgatgcgaaagcgccaagttttcgccacgaagcgtacgaagcttacaaagccgggcgtgctccaacgccggaagactttcctcgccaattggcgcttatgaaggaattagtggatttgcttggcctcgaacgcttggaagttcccggtttcgaggcagacgacgtattagcgactctcgcaaagaaagccgaacgtgagggctatgaagtccagatcttgacagcagatcgcgatcttttccagcttttatctccgcgcatctcggtgttacacccggaagggcatcgtatcaccccggaatggctctgggagaaatatggtttgcgtcccgaacaatgggtggattttcgcgccttagcaggcgatccgagcgacaatattccgggagttaaaggtatcggcgagaagacggcgctcaagctccttaaagaatgggggtcgttggagaacttgcttaagaatttagatcaggtcaaaccagagtcagtgcgtgagaagattcttgctcacctcgaagacctcaaattaagccgcgaattgtcccgtgtacgcaccgatttgccgctcgaagttgatttcggtcgccgccgcgaacctgactgggagggtcttaaagcgtttttagagcgtcttgaatttggttcgctcttgcatgaattcggccttttagaaagcccgttactggccgaagaagcaccttggccaccgcccgagggcgcgtttttaggttaccgtttgagtcgcccggaaccgatgtgggccgaattactggctcttgcagcgtctgcccagggacgtgtgtatcgcgcggaagaccctcatggtgcgctccgcggcctcttcgaagtccgtggcctccttgccaaagacttagctgttgttgcattgcgcgaaggtcttgatttacctccgactgatgatccaatgcttcttgcgtacctcttggacccgtcaaacacgacgcccgaaggcgtagcccgtcgttacggcggcgagtggaccgaagatgcagcgaaacgcgcgttattggccgaacgtttgcacgaaaatttattaggacgtttgcaaggcgaggcgcgtctccgttggctttacgaagaagtggagaaaccattgagtcgcgtgctcgcgcatatggaagctaccggtgtcaaattagacgtggcgtatttggagaatctcagccttgaagttgctgcccacatgcgccgcttggaggaagaagtattccgtttagcaggccgttcctttcgccttaactctcgcgatcagttagaacgtgtgttgttcgatgaacttggtctccctcctatcggcaagacagagaagaccggtaaacgtagcacttcagcggcggttttagaagctcttcgcgaagtccatcccattgtggacaagatcttgcagtaccgcgaaatggcgaaattgaaaggcacctatattgaccgtcttccggcattagtccacccgaaaacgggacgcctccatacccgcttcaaccaaacagccacggcgaccggtcgtttgtcctcctctgatccaaaccttcagaatattccagtacgtacctttttgggccagaagatccgccgtgcgtttgtagctgagccgggttggcgtttagtggccctcgattatcgtcaaattgaattacgtgtccttgcccatctttctggcgatgagaacctcatccgcgtgtttcaggaaggcaaagacattcacactcaaacggcaagctggatgtttggattatcagctgaagcgatcgatcctttgatgcgtcgtgcagcgaagaccatcaatttcggtgttctctacggtatgagtgcctttcgtttgtcgcaggaattaggcattccctatgaagaagctcaggcgttcattcagaaatactttcaaggctatcccaaagttaaagcatggatcgagaagactctccgtgaaggccgcacacgtggttacgtagagaccttatttggacgtcgccgctatgttcccgatttaaactcgcgcgtgaaaggcaagcgtgaagccgccgaacgcatggcgttcaacatgcctgtacagggcacggcagctgacctcatgaaacttgcaatggtgcgcctttttccacaattgcgtgaagttggtgcccgcatgctcttgcaggtccacgatgaactcttgttagaagcgccaaaagagcgtgcggaagaggtggcagccctcgcgaaagaagttatggaaggcgtgtggcccttagcggtgcctcttgaagtcgaagttggtattggcgaggattggctggctgccaaagga

SEQ ID NO: 6584 - protein, 841 aa, synthetic construct
  REGION 1..841: note = Variant of DNA polymerase I from Thermus sp. strain 2.9
MHHHHHHGGSGVLPVFEPKGRVLLVDGHHLAYRNFFALKGLTTSLGEPVQGVYGFAKSLLKALKEDGDVVIVVFDAKAPSFRHEAYEAYKAGRAPTPEDFPRQLALMKELVDLLGLERLEVPGFEADDVLATLAKKAEREGYEVQILTADRDLFQLLSPRISVLHPEGHRITPEWLWEKYGLRPEQWVDFRALAGDPSDNIPGVKGIGEKTALKLLKEWGSLENLLKNLDQVKPESVREKILAHLEDLKLSRELSRVRTDLPLEVDFGRRREPDWEGLKAFLERLEFGSLLHEFGLLESPLLAEEAPWPPPEGAFLGYRLSRPEPMWAELLALAASAQGRVYRAEDPHGALRGLFEVRGLLAKDLAVVALREGLDLPPTDDPMLLAYLLDPSNTTPEGVARRYGGEWTEDAAKRALLAERLHENLLGRLQGEARLRWLYEEVEKPLSRVLAHMEATGVKLDVAYLENLSLEVAAHMRRLEEEVFRLAGRSFRLNSRDQLERVLFDELGLPPIGKTEKTGKRSTSAAVLEALREVHPIVDKILQYREMAKLKGTYIDRLPALVHPKTGRLHTRFNQTATATGRLSSSDPNLQNIPVRTFLGQKIRRAFVAEPGWRLVALDYRQIELRVLAHLSGDENLIRVFQEGKDIHTQTASWMFGLSAEAIDPLMRRAAKTINFGVLYGMSAFRLSQELGIPYEEAQAFIQKYFQGYPKVKAWIEKTLREGRTRGYVETLFGRRRYVPDLNSRVKGKREAAERMAFNMPVQGTAADLMKLAMVRLFPQLREVGARMLLQVHDELLLEAPKERAEEVAALAKEVMEGVWPLAVPLEVEVGIGEDWLAAKG

SEQ ID NO: 6585 - DNA, 2523 bp, synthetic construct
  misc_feature 1..2523: note = Variant of DNA polymerase I from Thermus sp. strain 2.9
  source 1..2523: mol_type = other DNA
atgcaccatcatcatcatcatggcggtagcggcgtgttaccggtgttcgagcctaaaggtcgcgtgcttctggttgatggccatcatctcgcgtatcgtaacttctttgccctgaaaggattaaccaccagcctgggcgagccggtacagggtgtctacggctttgcaaagtcgctcctgaaagctctgaaagaagacggtgatgtggtgattgttgtctttgatgcgaaagcgccaagttttcgccacgaagcgtacgaagcttacaaagccgggcgtgctccaacgccggaagactttcctcgccaattggcgcttatgaaggaattagtggatttgcttggcctcgaacgcttggaagttcccggtttcgaggcagacgacgtattagcgactctcgcaaagaaagccgaacgtgagggctatgaagtccagatcttgacagcagatcgcgatcttttccagcttttatctccgcgcatctcggtgttacacccggaagggcatcgtatcaccccggaatggctctgggagaaatatggtttgcgtcccgaacaatgggtggattttcgcgccttagcaggcgatccgagcgacaatattccgggagttaaaggtatcggcgagaagacggcgctcaagctccttaaagaatgggggtcgttggagaacttgcttaagaatttagatcaggtcaaaccagagtcagtgcgtgagaagattcttgctcacctcgaagacctcaaattaagccgcgaattgtcccgtgtacgcaccgatttgccgctcgaagttgatttcggtcgccgccgcgaacctgactgggagggtcttaaagcgtttttagagcgtcttgaatttggttcgctcttgcatgaattcggccttttagaaagcccgttactggccgaagaagcaccttggccaccgcccgagggcgcgtttttaggttaccgtttgagtcgcccggaaccgatgtgggccgaattactggctcttgcagcgtctgcccagggacgtgtgtatcgcgcggaagaccctcatggtgcgctccgcggcctcttcgaagtccgtggactccttgccaaagacttagctgttgttgcattgcgcgaaggtcttgatttacctccgactgatgatccaatgcttcttgcgtacctcttggacccgtcaaacacgacgcccgaaggcgtagcccgtcgttacggcggcgagtggtgggaagatgcaggcaaacgcgcgttattggccgaacgtttgcacgaaaatttattaggacgtttgcaaggcgaggaacgtctcctgtggctttacgaagaagtggagaaaccattgagtcgcgtgctcgcgcatatggaagctaccggtgtcaaattagacgtggcgtatttggagaatctcagccttgaagttgctgcccacatgcgccgcttggaggaagaagtattccgtttagcaggccgttcctttcgccttaactctcgcgatcagttagaacgtgtgttgttcgatgaacttggtctccctcctatcggcaagacagagaagaccggtaaacgtagcacttcagcggcggttttagaagctcttcgcgaagtccatcccattgtggacaagatcttgcagtaccgcgaaatggcgaaattgaaaggcacctatattgaccgtcttccggcattagtccacccgaaaacgggacgcctccatacccgcttcaaccaaacagccacggcgaccggtcgtttgtcctcctctgatccaaaccttcagaatattccagtacgtaccccattgggccagaagatccgccgtgcgtttgtagctgagccgggttgggcgttagtggccctcgattatcgtcaaattgaattacgtgtccttgcccatctttctggcgatgagaacctcatccgcgtgtttcaggaaggcaaagacattcacactcaaacggcaagctggatgtttggattatcagctgaagcgatcgatcctttgatgcgtcgtgcagcgaagaccatcaatttcggtgttctctacggtatgagtgcctttcgtttgtcgcaggaattaggcattccctatgaagaagctcaggcgttcattcagaaatactttcaaagctatcccaaagttaaagcatggatcgagaagactctccgtgaaggccgcacacgtggttacgtagagaccttatttggacgtcgccgctatgttcccgatttaaacgctcgcgtgaaaggcaagcgtgaagccgccgaacgcatggcgttcaacatgcctgtacagggcacggcagctgacctcatgaaacttgcaatggtgcgcctttttccacaattgcgtgaagttggtgcccgcatgctgttgcaggtccacgatgaactcttgttagaagcgccaaaagagcgtgcggaagaggtggcagccctcgcgaaagaagttatggaaggcgtgtggcccttagcggtgcctcttgaagtcgaagttggtattggcgaggattggctggctgccaaagga

SEQ ID NO: 6586 - protein, 841 aa, synthetic construct
  REGION 1..841: note = Variant of DNA polymerase I from Thermus sp. strain 2.9
MHHHHHHGGSGVLPVFEPKGRVLLVDGHHLAYRNFFALKGLTTSLGEPVQGVYGFAKSLLKALKEDGDVVIVVFDAKAPSFRHEAYEAYKAGRAPTPEDFPRQLALMKELVDLLGLERLEVPGFEADDVLATLAKKAEREGYEVQILTADRDLFQLLSPRISVLHPEGHRITPEWLWEKYGLRPEQWVDFRALAGDPSDNIPGVKGIGEKTALKLLKEWGSLENLLKNLDQVKPESVREKILAHLEDLKLSRELSRVRTDLPLEVDFGRRREPDWEGLKAFLERLEFGSLLHEFGLLESPLLAEEAPWPPPEGAFLGYRLSRPEPMWAELLALAASAQGRVYRAEDPHGALRGLFEVRGLLAKDLAVVALREGLDLPPTDDPMLLAYLLDPSNTTPEGVARRYGGEWWEDAGKRALLAERLHENLLGRLQGEERLLWLYEEVEKPLSRVLAHMEATGVKLDVAYLENLSLEVAAHMRRLEEEVFRLAGRSFRLNSRDQLERVLFDELGLPPIGKTEKTGKRSTSAAVLEALREVHPIVDKILQYREMAKLKGTYIDRLPALVHPKTGRLHTRFNQTATATGRLSSSDPNLQNIPVRTPLGQKIRRAFVAEPGWALVALDYRQIELRVLAHLSGDENLIRVFQEGKDIHTQTASWMFGLSAEAIDPLMRRAAKTINFGVLYGMSAFRLSQELGIPYEEAQAFIQKYFQSYPKVKAWIEKTLREGRTRGYVETLFGRRRYVPDLNARVKGKREAAERMAFNMPVQGTAADLMKLAMVRLFPQLREVGARMLLQVHDELLLEAPKERAEEVAALAKEVMEGVWPLAVPLEVEVGIGEDWLAAKG

SEQ ID NO: 6587 - DNA, 2523 bp, synthetic construct
  misc_feature 1..2523: note = Variant of DNA polymerase I from Thermus sp. strain 2.9
  source 1..2523: mol_type = other DNA
atgcaccatcatcatcatcatggcggtagcggcgtgttaccggtgttcgagcctaaaggtcgcgtgcttctggttgatggccatcatctcgcgtatcgtaacttctttgccctgaaaggattaaccaccagcctgggcgagccggtacagggtgtctacggctttgcaaagtcgctcctgaaagctctgaaagaagacggtgatgtggtgattgttgtctttgatgcgaaagcgccaagttttcgccacgaagcgtacgaagcttacaaagccgggcgtgctccaacgccggaagactttcctcgccaattggcgcttatgaaggaattagtggatttgcttggcctcgaacgcttggaagttcccggtttcgaggcagacgacgtattagcgactctcgcaaagaaagccgaacgtgagggctatgaagtccagatcttgacagcagatcgcgatcttttccagcttttatctccgcgcatctcggtgttacacccggaagggcatcgtatcaccccggaatggctctgggagaaatatggtttgcgtcccgaacaatgggtggattttcgcgccttagcaggcgatccgagcgacaatattccgggagttaaaggtatcggcgagaagacggcgctcaagctccttaaagaatgggggtcgttggagaacttgcttaagaatttagatcaggtcaaaccagagtcagtgcgtgagaagattcttgctcacctcgaagacctcaaattaagccgcgaattgtcccgtgtacgcaccgatttgccgctcgaagttgatttcggtcgccgccgcgaacctgactgggagggtcttaaagcgtttttagagcgtcttgaatttggttcgctcttgcatgaattcggccttttagaaagcccgttactggccgaagaagcaccttggccaccgcccgagggcgcgtttttaggttaccgtttgagtcgcccggaaccgatgtgggccgaattactggctcttgcagcgtctgcccagggacgtgtgtatcgcgcggaagaccctcatggtgcgctccgcggcctcttcgaagtccgtaccctccttgccaaagacttagctgttgttgcattgcgcgaaggtcttgatttacctccgactgatgatccaatgcttcttgcgtacctcttggacccgtcaaacacgacgcccgaaggcgtagcccgtcgttacggcggcgagtggaccgaagatgcaggcaaacgcgcgttattggccgaacgtttgcacgaaaatttattaggacgtttgcaaggcgaggagcgtctcctgtggctttacgaagaagtggagaaaccattgagtcgcgtgctcgcgcatatggaagctaccggtgtcaaattagacgtggcgtatttggagaatctcagccttgaagttgctgcccacatgcgccgcttggaggaagaagtattccgtttagcaggccgttcctttcgccttaactctcgcgatcagttagaacgtgtgttgttcgatgaacttggtctccctcctatcggcaagacagagaagaccggtaaacgtagcacttcagcggcggttttagaagctcttcgcgaagtccatcccattgtggacaagatcttgcagtaccgcgaaatggcgaaattgaaaggcacctatattgaccgtcttccggcattagtccacccgaaaacgggacgcctccatacccgcttcaaccaaacagccacggcgaccggtcgtttgtcctcctctgatccaaaccttcagaatattccagtacgtaccccattgggccagaagatccgccgtgcgtttgtagctgagaagggttgggcgttagtggccctcgattatcgtcaaattgaattacgtgtccttgcccatctttctggcgatgagaacctcatccgcgtgtttcaggaaggcaaagacattcacactcaaacggcaagctggatgtttggattatcagctgaagcgatcgatcctttgatgcgtcgtgcagcgaagaccatcaatttcggtgttctctacggtatgagtgcctttcgtttgtcgcaggaattaggcattccctatgaagaagctcaggctttcattcagaaatactttcaaggctatcccaaagttaaagcatggatcgagaagactctccgtgaaggccgcacacgtggttacgtagagaccttatttggacgtcgccgctatgttcccgatttaaacggtcgcgtgaaaggcaagcgtgaagccgccgaacgcatggcgttcaacatgcctgtacagggcacggcagctgacctcatgaaacttgcaatggtgcgcctttttccacaattgcgtgaagttggtgcccgcatgctgttgcaggtccacgatgaactcttgttagaagcgccaaaagagcgtgcggaagaggtggcagccctcgcgaaagaagttatggaaggcgtgtggcccttagcggtgcctcttgaagtcgaagttggtattggcgaggattggctggctgccaaagga

SEQ ID NO: 6588 - protein, 841 aa, synthetic construct
  REGION 1..841: note = Variant of DNA polymerase I from Thermus sp. strain 2.9
MHHHHHHGGSGVLPVFEPKGRVLLVDGHHLAYRNFFALKGLTTSLGEPVQGVYGFAKSLLKALKEDGDVVIVVFDAKAPSFRHEAYEAYKAGRAPTPEDFPRQLALMKELVDLLGLERLEVPGFEADDVLATLAKKAEREGYEVQILTADRDLFQLLSPRISVLHPEGHRITPEWLWEKYGLRPEQWVDFRALAGDPSDNIPGVKGIGEKTALKLLKEWGSLENLLKNLDQVKPESVREKILAHLEDLKLSRELSRVRTDLPLEVDFGRRREPDWEGLKAFLERLEFGSLLHEFGLLESPLLAEEAPWPPPEGAFLGYRLSRPEPMWAELLALAASAQGRVYRAEDPHGALRGLFEVRTLLAKDLAVVALREGLDLPPTDDPMLLAYLLDPSNTTPEGVARRYGGEWTEDAGKRALLAERLHENLLGRLQGEERLLWLYEEVEKPLSRVLAHMEATGVKLDVAYLENLSLEVAAHMRRLEEEVFRLAGRSFRLNSRDQLERVLFDELGLPPIGKTEKTGKRSTSAAVLEALREVHPIVDKILQYREMAKLKGTYIDRLPALVHPKTGRLHTRFNQTATATGRLSSSDPNLQNIPVRTPLGQKIRRAFVAEKGWALVALDYRQIELRVLAHLSGDENLIRVFQEGKDIHTQTASWMFGLSAEAIDPLMRRAAKTINFGVLYGMSAFRLSQELGIPYEEAQAFIQKYFQGYPKVKAWIEKTLREGRTRGYVETLFGRRRYVPDLNGRVKGKREAAERMAFNMPVQGTAADLMKLAMVRLFPQLREVGARMLLQVHDELLLEAPKERAEEVAALAKEVMEGVWPLAVPLEVEVGIGEDWLAAKG

SEQ ID NO: 6589 - DNA, 2523 bp, synthetic construct
  misc_feature 1..2523: note = Variant of DNA polymerase I from Thermus sp. strain 2.9
  source 1..2523: mol_type = other DNA
atgcaccatcatcatcatcatggcggtagcggcgtgttaccggtgttcgagcctaaaggtcgcgtgcttctggttgatggccatcatctcgcgtatcgtaacttctttgccctgaaaggattaaccaccagcctgggcgagccggtacagggtgtctacggctttgcaaagtcgctcctgaaagctctgaaagaagacggtgatgtggtgattgttgtctttgatgcgaaagcgccaagttttcgccacgaagcgtacgaagcttacaaagccgggcgtgctccaacgccggaagactttcctcgccaattggcgcttatgaaggaattagtggatttgcttggcctcgaacgcttggaagttcccggtttcgaggcagacgacgtattagcgactctcgcaaagaaagccgaacgtgagggctatgaagtccagatcttgacagcagatcgcgatcttttccagcttttatctccgcgcatctcggtgttacacccggaagggcatcgtatcaccccggaatggctctgggagaaatatggtttgcgtcccgaacaatgggtggattttcgcgccttagcaggcgatccgagcgacaatattccgggagttaaaggtatcggcgagaagacggcgctcaagctccttaaagaatgggggtcgttggagaacttgcttaagaatttagatcaggtcaaaccagagtcagtgcgtgagaagattcttgctcacctcgaagacctcaaattaagccgcgaattgtcccgtgtacgcaccgatttgccgctcgaagttgatttcggtcgccgccgcgaacctgactgggagggtcttaaagcgtttttagagcgtcttgaatttggttcgctcttgcatgaattcggccttttagaaagcccgttactggccgaagaagcaccttggccaccgcccgagggcgcgtttttaggttaccgtttgagtcgcccggaaccgatgtgggccgaattactggctcttgcagcgtctgcccagggacgtgtgtatcgcgcggaagaccctcatggtgcgctccgcggcctcttcgaagtccgtggcctccttgccaaagacttagctgttgttgcattgcgcgaaggtcttgatttacctccgactgatgatccaatgcttcttgcgtacctcttggacccgtcaaacacgacgcccgaaggcgtagcccgtcgttacggcggcgagtggaccgaagatgcagcgaaacgcgcgttattggccgaacgtttgcacgaaaatttattaggacgtttgcaaggcgaggcgcgtctccgttggctttacgaagaagtggagaaaccattgagtcgcgtgctcgcgcatatggaagctaccggtgtcaaattagacgtggcgtatttggagaatctcagccttgaagttgctgcccacatgcgccgcttggaggaagaagtattccgtttagcaggccgttcctttcgccttaactctcgcgatcagttagaacgtgtgttgttcgatgaacttggtctccctcctatcggcaagacagagaagaccggtaaacgtagcacttcagcggcggttttagaagctcttcgcgaagtccatcccattgtggacaagatcttgcagtaccgcgaaatggcgaaattgaaaggcacctatattgaccgtcttccggcattagtccacccgaaaacgggacgcctccatacccgcttcaaccaaacagccacggcgaccggtcgtttgtcctcctctgatccaaaccttcagaatattccagtacgtaccccattgggccagaagatccgccgtgcgtttgtagctgagccgggttgggcgttagtggccctcgattatcgtcaaattgaattacgtgtccttgcccatctttctggcgatgagaacctcatccgcgtgtttcaggaaggcaaagacattcacactcaaacggcaagctggatgtttggattatcagctgaagcgatcgatcctttgatgcgtcgtgcagcgaagaccatcaatttcggtgttctctacggtatgagtgcctttcgtttgtcgcaggaattaggcattccctatgaagaagctcaggcgttcattcagaaatactttcaaagctatcccaaagttaaagcatggatcgagaagactctccgtgaaggccgcacacgtggttacgtagagaccttatttggacgtcgccgctatgttcccgatttaaacggtcgcgtgaaaggcaagcgtgaagccgccgaacgcatggcgttcaacatgcctgtacagggcacggcagctgacctcatgaaacttgcaatggtgcgcctttttccacaattgcgtgaagttggtgcccgcatgctcttgcaggtccacgatgaactcttgttagaagcgccaaaagagcgtgcggaagaggtggcagccctcgcgaaagaagttatggaaggcgtgtggcccttagcggtgcctcttgaagtcgaagttggtattggcgaggattggctggctgccaaagga

SEQ ID NO: 6590 - protein, 841 aa, synthetic construct
  REGION 1..841: note = Variant of DNA polymerase I from Thermus sp. strain 2.9
MHHHHHHGGSGVLPVFEPKGRVLLVDGHHLAYRNFFALKGLTTSLGEPVQGVYGFAKSLLKALKEDGDVVIVVFDAKAPSFRHEAYEAYKAGRAPTPEDFPRQLALMKELVDLLGLERLEVPGFEADDVLATLAKKAEREGYEVQILTADRDLFQLLSPRISVLHPEGHRITPEWLWEKYGLRPEQWVDFRALAGDPSDNIPGVKGIGEKTALKLLKEWGSLENLLKNLDQVKPESVREKILAHLEDLKLSRELSRVRTDLPLEVDFGRRREPDWEGLKAFLERLEFGSLLHEFGLLESPLLAEEAPWPPPEGAFLGYRLSRPEPMWAELLALAASAQGRVYRAEDPHGALRGLFEVRGLLAKDLAVVALREGLDLPPTDDPMLLAYLLDPSNTTPEGVARRYGGEWTEDAAKRALLAERLHENLLGRLQGEARLRWLYEEVEKPLSRVLAHMEATGVKLDVAYLENLSLEVAAHMRRLEEEVFRLAGRSFRLNSRDQLERVLFDELGLPPIGKTEKTGKRSTSAAVLEALREVHPIVDKILQYREMAKLKGTYIDRLPALVHPKTGRLHTRFNQTATATGRLSSSDPNLQNIPVRTPLGQKIRRAFVAEPGWALVALDYRQIELRVLAHLSGDENLIRVFQEGKDIHTQTASWMFGLSAEAIDPLMRRAAKTINFGVLYGMSAFRLSQELGIPYEEAQAFIQKYFQSYPKVKAWIEKTLREGRTRGYVETLFGRRRYVPDLNGRVKGKREAAERMAFNMPVQGTAADLMKLAMVRLFPQLREVGARMLLQVHDELLLEAPKERAEEVAALAKEVMEGVWPLAVPLEVEVGIGEDWLAAKG

SEQ ID NO: 6591 - DNA, 2523 bp, synthetic construct
  misc_feature 1..2523: note = Variant of DNA polymerase I from Thermus sp. strain 2.9
  source 1..2523: mol_type = other DNA
atgcaccatcatcatcatcatggcggtagcggcgtgttaccggtgttcgagcctaaaggtcgcgtgcttctggttgatggccatcatctcgcgtatcgtaacttctttgccctgaaaggattaaccaccagcctgggcgagccggtacagggtgtctacggctttgcaaagtcgctcctgaaagctctgaaagaagacggtgatgtggtgattgttgtctttgatgcgaaagcgccaagttttcgccacgaagcgtacgaagcttacaaagccgggcgtgctccaacgccggaagactttcctcgccaattggcgcttatgaaggaattagtggatttgcttggcctcgaacgcttggaagttcccggtttcgaggcagacgacgtattagcgactctcgcaaagaaagccgaacgtgagggctatgaagtccagatcttgacagcagatcgcgatcttttccagcttttatctccgcgcatctcggtgttacacccggaagggcatcgtatcaccccggaatggctctgggagaaatatggtttgcgtcccgaacaatgggtggattttcgcgccttagcaggcgatccgagcgacaatattccgggagttaaaggtatcggcgagaagacggcgctcaagctccttaaagaatgggggtcgttggagaacttgcttaagaatttagatcaggtcaaaccagagtcagtgcgtgagaagattcttgctcacctcgaagacctcaaattaagccgcgaattgtcccgtgtacgcaccgatttgccgctcgaagttgatttcggtcgccgccgcgaacctgactgggagggtcttaaagcgtttttagagcgtcttgaatttggttcgctcttgcatgaattcggccttttagaaagcccgttactggccgaagaagcaccttggccaccgcccgagggcgcgtttttaggttaccgtttgagtcgcccggaaccgatgtgggccgaattactggctcttgcagcgtctgcccagggacgtgtgtatcgcgcggaagaccctcatggtgcgctccgcggcctcttcgaagtccgtggcctccttgccaaagacttagctgttgttgcattgcgcgaaggtcttgatttacctccgactgatgatccaatgcttcttgcgtacctcttggacccgtcaaacacgacgcccgaaggcgtagcccgtcgttacggcggcgagtggtgggaagatgcaggcaaacgcgcgttattggccgaacgtttgcacgaaaatttattaggacgtttgcaaggcgaggaacgtctcctctggctttacgaagaagtggagaaaccattgagtcgcgtgctcgcgcatatggaagctaccggtgtcaaattagacgtggcgtatttggagaatctcagccttgaagttgctgcccacatgcgccgcttggaggaagaagtattccgtttagcaggccgttcctttcgccttaactctcgcgatcagttagaacgtgtgttgttcgatgaacttggtctccctcctatcggcaagacagagaagaccggtaaacgtagcacttcagcggcggttttagaagctcttcgcgaagtccatcccattgtggacaagatcttgcagtaccgcgaaatggcgaaattgaaaggcacctatattgaccgtcttccggcattagtccacccgaaaacgggacgcctccatacccgcttcaaccaaacagccacggcgaccggtcgtttgtcctcctctgatccaaaccttcagaatattccagtacgtaccccattgggccagaagatccgccgtgcgtttgtagctgaggagggttgggcgttagtggccctcgattatcgtcaaattgaattacgtgtccttgcccatctttctggcgatgagaacctcatccgcgtgtttcaggaaggcaaagacattcacactcaaacggcaagctggatgtttggattatcagctgaagcgatcgatcctttgatgcgtcgtgcagcgaagaccatcaatttcggtgttctctacggtatgagtgcctttcgtttgtcgcaggaattaggcattccctatgaagaagctcaggcgttcattcagaaatactttcaaagctatcccaaagttaaagcatggatcgagaagactctccgtgaaggccgcacacgtggttacgtagagaccttatttggacgtcgccgctatgttcccgatttaaacggtcgcgtgaaaggcaagcgtgaagccgccgaacgcatggcgttcaacatgcctgtacagggcacggcagctgacctcatgaaacttgcaatggtgcgcctttttccacaattgcgtgaagttggtgcccgcatgctcttgcaggtccacgatgaactcttgttagaagcgccaaaagagcgtgcggaagaggtggcagccctcgcgaaagaagttatggaaggcgtgtggcccttagcggtgcctcttgaagtcgaagttggtattggcgaggattggctggctgccaaagga

SEQ ID NO: 6592 - protein, 841 aa, synthetic construct
  REGION 1..841: note = Variant of DNA polymerase I from Thermus sp. strain 2.9
MHHHHHHGGSGVLPVFEPKGRVLLVDGHHLAYRNFFALKGLTTSLGEPVQGVYGFAKSLLKALKEDGDVVIVVFDAKAPSFRHEAYEAYKAGRAPTPEDFPRQLALMKELVDLLGLERLEVPGFEADDVLATLAKKAEREGYEVQILTADRDLFQLLSPRISVLHPEGHRITPEWLWEKYGLRPEQWVDFRALAGDPSDNIPGVKGIGEKTALKLLKEWGSLENLLKNLDQVKPESVREKILAHLEDLKLSRELSRVRTDLPLEVDFGRRREPDWEGLKAFLERLEFGSLLHEFGLLESPLLAEEAPWPPPEGAFLGYRLSRPEPMWAELLALAASAQGRVYRAEDPHGALRGLFEVRGLLAKDLAVVALREGLDLPPTDDPMLLAYLLDPSNTTPEGVARRYGGEWWEDAGKRALLAERLHENLLGRLQGEERLLWLYEEVEKPLSRVLAHMEATGVKLDVAYLENLSLEVAAHMRRLEEEVFRLAGRSFRLNSRDQLERVLFDELGLPPIGKTEKTGKRSTSAAVLEALREVHPIVDKILQYREMAKLKGTYIDRLPALVHPKTGRLHTRFNQTATATGRLSSSDPNLQNIPVRTPLGQKIRRAFVAEEGWALVALDYRQIELRVLAHLSGDENLIRVFQEGKDIHTQTASWMFGLSAEAIDPLMRRAAKTINFGVLYGMSAFRLSQELGIPYEEAQAFIQKYFQSYPKVKAWIEKTLREGRTRGYVETLFGRRRYVPDLNGRVKGKREAAERMAFNMPVQGTAADLMKLAMVRLFPQLREVGARMLLQVHDELLLEAPKERAEEVAALAKEVMEGVWPLAVPLEVEVGIGEDWLAAKG

SEQ ID NO: 6593 - DNA, 2523 bp, synthetic construct
  misc_feature 1..2523: note = Variant of DNA polymerase I from Thermus sp. strain 2.9
  source 1..2523: mol_type = other DNA
atgcaccatcatcatcatcatggcggtagcggcgtgttaccggtgttcgagcctaaaggtcgcgtgcttctggttgatggccatcatctcgcgtatcgtaacttctttgccctgaaaggattaaccaccagcctgggcgagccggtacagggtgtctacggctttgcaaagtcgctcctgaaagctctgaaagaagacggtgatgtggtgattgttgtctttgatgcgaaagcgccaagttttcgccacgaagcgtacgaagcttacaaagccgggcgtgctccaacgccggaagactttcctcgccaattggcgcttatgaaggaattagtggatttgcttggcctcgaacgcttggaagttcccggtttcgaggcagacgacgtattagcgactctcgcaaagaaagccgaacgtgagggctatgaagtccagatcttgacagcagatcgcgatcttttccagcttttatctccgcgcatctcggtgttacacccggaagggcatcgtatcaccccggaatggctctgggagaaatatggtttgcgtcccgaacaatgggtggattttcgcgccttagcaggcgatccgagcgacaatattccgggagttaaaggtatcggcgagaagacggcgctcaagctccttaaagaatgggggtcgttggagaacttgcttaagaatttagatcaggtcaaaccagagtcagtgcgtgagaagattcttgctcacctcgaagacctcaaattaagccgcgaattgtcccgtgtacgcaccgatttgccgctcgaagttgatttcggtcgccgccgcgaacctgactgggagggtcttaaagcgtttttagagcgtcttgaatttggttcgctcttgcatgaattcggccttttagaaagcccgttactggccgaagaagcaccttggccaccgcccgagggcgcgtttttaggttaccgtttgagtcgcccggaaccgatgtgggccgaattactggctcttgcagcgtctgcccagggacgtgtgtatcgcgcggaagaccctcatggtgcgctccgcggcctcttcgaagtccgtggcctccttgccaaagacttagctgttgttgcattgcgcgaaggtcttgatttacctccgactgatgatccaatgcttcttgcgtacctcttggacccgtcaaacacgacgcccgaaggcgtagcccgtcgttacggcggcgagtggaccgaagatgcagccaaacgcgcgttattggccgaacgtttgcacgaaaatttattaggacgtttgcaaggcgaggaacgtctcctctggctttacgaagaagtggagaaaccattgagtcgcgtgctcgcgcatatggaagctaccggtgtcaaattagacgtggcgtatttggagaatctcagccttgaagttgctgcccacatgcgccgcttggaggaagaagtattccgtttagcaggccgttcctttcgccttaactctcgcgatcagttagaacgtgtgttgttcgatgaacttggtctccctcctatcggcaagacagagaagaccggtaaacgtagcacttcagcggcggttttagaagctcttcgcgaagtccatcccattgtggacaagatcttgcagtaccgcgaaatggcgaaattgaaaggcacctatattgaccgtcttccggcattagtccacccgaaaacgggacgcctccatacccgcttcaaccaaacagccacggcgaccggtcgtttgtcctcctctgatccaaaccttcagaatattccagtacgtaccccattgggccagaagatccgccgtgcgtttgtagctgaggagggttgggcgttagtggccctcgattatcgtcaaattgaattacgtgtccttgcccatctttctggcgatgagaacctcatccgcgtgtttcaggaaggcaaagacattcacactcaaacggcaagctggatgtttggattatcagctgaagcgatcgatcctttgatgcgtcgtgcagcgaagaccatcaatttcggtgttctctacggtatgagtgcctttcgtttgtcgcaggaattaggcattccctatgaagaagctcagggtttcattcagaaatactttcaaagctatcccaaagttaaagcatggatcgagaagactctccgtgaaggccgcacacgtggttacgtagagaccttatttggacgtcgccgctatgttcccgatttaaactcgcgcgtgaaaggcaagcgtgaagccgccgaacgcatggcgttcaacatgcctgtacagggcacggcagctgacctcatgaaacttgcaatggtgcgcctttttccacaattgcgtgaagttggtgcccgcatgctcttgcaggtccacgatgaactcttgttagaagcgccaaaagagcgtgcggaagaggtggcagccctcgcgaaagaagttatggaaggcgtgtggcccttagcggtgcctcttgaagtcgaagttggtattggcgaggattggctggctgccaaagga

SEQ ID NO: 6594 - protein, 841 aa, synthetic construct
  REGION 1..841: note = Variant of DNA polymerase I from Thermus sp. strain 2.9
MHHHHHHGGSGVLPVFEPKGRVLLVDGHHLAYRNFFALKGLTTSLGEPVQGVYGFAKSLLKALKEDGDVVIVVFDAKAPSFRHEAYEAYKAGRAPTPEDFPRQLALMKELVDLLGLERLEVPGFEADDVLATLAKKAEREGYEVQILTADRDLFQLLSPRISVLHPEGHRITPEWLWEKYGLRPEQWVDFRALAGDPSDNIPGVKGIGEKTALKLLKEWGSLENLLKNLDQVKPESVREKILAHLEDLKLSRELSRVRTDLPLEVDFGRRREPDWEGLKAFLERLEFGSLLHEFGLLESPLLAEEAPWPPPEGAFLGYRLSRPEPMWAELLALAASAQGRVYRAEDPHGALRGLFEVRGLLAKDLAVVALREGLDLPPTDDPMLLAYLLDPSNTTPEGVARRYGGEWTEDAAKRALLAERLHENLLGRLQGEERLLWLYEEVEKPLSRVLAHMEATGVKLDVAYLENLSLEVAAHMRRLEEEVFRLAGRSFRLNSRDQLERVLFDELGLPPIGKTEKTGKRSTSAAVLEALREVHPIVDKILQYREMAKLKGTYIDRLPALVHPKTGRLHTRFNQTATATGRLSSSDPNLQNIPVRTPLGQKIRRAFVAEEGWALVALDYRQIELRVLAHLSGDENLIRVFQEGKDIHTQTASWMFGLSAEAIDPLMRRAAKTINFGVLYGMSAFRLSQELGIPYEEAQGFIQKYFQSYPKVKAWIEKTLREGRTRGYVETLFGRRRYVPDLNSRVKGKREAAERMAFNMPVQGTAADLMKLAMVRLFPQLREVGARMLLQVHDELLLEAPKERAEEVAALAKEVMEGVWPLAVPLEVEVGIGEDWLAAKG

SEQ ID NO: 6595 - DNA, 2523 bp, synthetic construct
  misc_feature 1..2523: note = Variant of DNA polymerase I from Thermus sp. strain 2.9
  source 1..2523: mol_type = other DNA
atgcaccatcatcatcatcatggcggtagcggcgtgttaccggtgttcgagcctaaaggtcgcgtgcttctggttgatggccatcatctcgcatatcgtaacttctttgccctgaaaggattaaccaccagcctgggcgagccggtacagggtgtctacggctttgcaaagtcgctcctgaaagctctgaaagaagacggtgatgtggtgattgttgtctttgatgcgaaagcgccaagttttcgccacgaagcgtacgaagcttacaaagccgggcgtgctccaacgccggaagactttcctcgccaattggcgcttatgaaggaattagtggatttgcttggcctcgaacgcttggaagttcccggtttcgaggcagacgacgtattagcgactctcgcaaagaaagccgaacgtgagggctatgaagtccagatcttgacagcagatcgcgatcttttccagcttttatctccgcgcatctcggtgttacacccggaagggcatcgtatcaccccggaatggctctgggagaaatatggtttgcgtcccgaacaatgggtggattttcgcgccttagcaggcgatccgagcgacaatattccgggagttaaaggtatcggcgagaagacggcgctcaagctccttaaagaatgggggtcgttggagaacttgcttaagaatttagatcaggtcaaaccagagtcagtgcgtgagaagattcttgctcacctcgaagacctcaaattaagccgcgaattgtcccgtgtacgcaccgatttgccgctcgaagttgatttcggtcgccgccgcgaacctgactgggagggtcttaaagcgtttttagagcgtcttgaatttggttcgctcttgcatgaattcggccttttagaaagcccgttactggccgaagaagcaccttggccaccgcccgagggcgcgtttttaggttaccgtttgagtcgcccggaaccgatgtgggccgaattactggctcttgcagcgtctgcccagggacgtgtgtatcgcgcggaagaccctcatggtgcgctccgcggcctcttcgaagtccgtaccctccttgccaaagacttagctgttgttgcattgcgcgaaggtcttgatttacctccgactgatgatccaatgcttcttgcgtacctcttggacccgtcaaacacgacgcccgaaggcgtagcccgtcgttacggcggcgagtggaccgaagatgcaggcaaacgcgcgttattggccgaacgtttgcacgaaaatttattaggacgtttgcaaggcgaggaacgtctcctctggctttacgaagaagtggagaaaccattgagtcgcgtgctcgcgcatatggaagctaccggtgtcaaattagacgtggcgtatttggagaatctcagccttgaagttgctgcccacatgcgccgcttggaggaagaagtattccgtttagcaggccgttcctttcgccttaactctcgcgatcagttagaacgtgtgttgttcgatgaacttggtctccctcctatcggcaagacagagaagaccggtaaacgtagcacttcagcggcggttttagaagctcttcgcgaagtccatcccattgtggacaagatcttgcagtaccgcgaaatggcgaaattgaaaggcacctatattgaccgtcttccggcattagtccacccgaaaacgggacgcctccatacccgcttcaaccaaacagccacggcgaccggtcgtttgtcctcctctgatccaaaccttcagaatattccagtacgtacctttttgggccagaagatccgccgtgcgtttgtagctgagccgggttggcgtttagtggccctcgattatcgtcaaattgaattacgtgtccttgcccatctttctggcgatgagaacctcatccgcgtgtttcaggaaggcaaagacattcacactcaaacggcaagctggatgtttggattatcagctgaagcgatcgatcctttgatgcgtcgtgcagcgaagaccatcaatttcggtgttctctacggtatgagtgcctttcgtttgtcgcaggaattaggcattccctatgaagaagctcagggtttcattcagaaatactttcaaggctatcccaaagttaaagcatggatcgagaagactctccgtgaaggccgcacacgtggttacgtagagaccttatttggacgtcgccgctatgttcccgatttaaactcgcgcgtgaaaggcaagcgtgaagccgccgaacgcatggcgttcaacatgcctgtacagggcacggcagctgacctcatgaaacttgcaatggtgcgcctttttccacaattgcgtgaagttggtgcccgcatgctgttgcaggtccacgatgaactcttgttagaagcgccaaaagagcgtgcggaagaggtggcagccctcgcgaaagaagttatggaaggcgtgtggcccttagcggtgcctcttgaagtcgaagttggtattggcgaggattggctggctgccaaagga

SEQ ID NO: 6596 - protein, 841 aa, synthetic construct
  REGION 1..841: note = Variant of DNA polymerase I from Thermus sp. strain 2.9
MHHHHHHGGSGVLPVFEPKGRVLLVDGHHLAYRNFFALKGLTTSLGEPVQGVYGFAKSLLKALKEDGDVVIVVFDAKAPSFRHEAYEAYKAGRAPTPEDFPRQLALMKELVDLLGLERLEVPGFEADDVLATLAKKAEREGYEVQILTADRDLFQLLSPRISVLHPEGHRITPEWLWEKYGLRPEQWVDFRALAGDPSDNIPGVKGIGEKTALKLLKEWGSLENLLKNLDQVKPESVREKILAHLEDLKLSRELSRVRTDLPLEVDFGRRREPDWEGLKAFLERLEFGSLLHEFGLLESPLLAEEAPWPPPEGAFLGYRLSRPEPMWAELLALAASAQGRVYRAEDPHGALRGLFEVRTLLAKDLAVVALREGLDLPPTDDPMLLAYLLDPSNTTPEGVARRYGGEWTEDAGKRALLAERLHENLLGRLQGEERLLWLYEEVEKPLSRVLAHMEATGVKLDVAYLENLSLEVAAHMRRLEEEVFRLAGRSFRLNSRDQLERVLFDELGLPPIGKTEKTGKRSTSAAVLEALREVHPIVDKILQYREMAKLKGTYIDRLPALVHPKTGRLHTRFNQTATATGRLSSSDPNLQNIPVRTFLGQKIRRAFVAEPGWRLVALDYRQIELRVLAHLSGDENLIRVFQEGKDIHTQTASWMFGLSAEAIDPLMRRAAKTINFGVLYGMSAFRLSQELGIPYEEAQGFIQKYFQGYPKVKAWIEKTLREGRTRGYVETLFGRRRYVPDLNSRVKGKREAAERMAFNMPVQGTAADLMKLAMVRLFPQLREVGARMLLQVHDELLLEAPKERAEEVAALAKEVMEGVWPLAVPLEVEVGIGEDWLAAKG

SEQ ID NO: 6597 - DNA, 2523 bp, synthetic construct
  misc_feature 1..2523: note = Variant of DNA polymerase I from Thermus sp. strain 2.9
  source 1..2523: mol_type = other DNA
atgcaccatcatcatcatcatggcggtagcggcgtgttaccggtgttcgagcctaaaggtcgcgtgcttctggttgatggccatcatctcgcgtatcgtaacttctttgccctgaaaggattaaccaccagcctgggcgagccggtacagggtgtctacggctttgcaaagtcgctcctgaaagctctgaaagaagacggtgatgtggtgattgttgtctttgatgcgaaagcgccaagttttcgccacgaagcgtacgaagcttacaaagccgggcgtgctccaacgccggaagactttcctcgccaattggcgcttatgaaggaattagtggatttgcttggcctcgaacgcttggaagttcccggtttcgaggcagacgacgtattagcgactctcgcaaagaaagccgaacgtgagggctatgaagtccagatcttgacagcagatcgcgatcttttccagcttttatctccgcgcatctcggtgttacacccggaagggcatcgtatcaccccggaatggctctgggagaaatatggtttgcgtcccgaacaatgggtggattttcgcgccttagcaggcgatccgagcgacaatattccgggagttaaaggtatcggcgagaagacggcgctcaagctccttaaagaatgggggtcgttggagaacttgcttaagaatttagatcaggtcaaaccagagtcagtgcgtgagaagattcttgctcacctcgaagacctcaaattaagccgcgaattgtcccgtgtacgcaccgatttgccgctcgaagttgatttcggtcgccgccgcgaacctgactgggagggtcttaaagcgtttttagagcgtcttgaatttggttcgctcttgcatgaattcggccttttagaaagcccgttactggccgaagaagcaccttggccaccgcccgagggcgcgtttttaggttaccgtttgagtcgcccggaaccgatgtgggccgaattactggctcttgcagcgtctgcccagggacgtgtgtatcgcgcggaagaccctcatggtgcgctccgcggcctcttcgaagtccgtggcctccttgccaaagacttagctgttgttgcattgcgcgaaggtcttgatttacctccgactgatgatccaatgcttcttgcgtacctcttggacccgtcaaacacgacgcccgaaggcgtagcccgtcgttacggcggcgagtggaccgaagatgcagcgaaacgcgcgttattggccgaacgtttgcacgaaaatttattaggacgtttgcaaggcgaggaacgtctcctctggctttacgaagaagtggagaaaccattgagtcgcgtgctcgcgcatatggaagctaccggtgtcaaattagacgtggcgtatttggagaatctcagccttgaagttgctgcccacatgcgccgcttggaggaagaagtattccgtttagcaggccgttcctttcgccttaactctcgcgatcagttagaacgtgtgttgttcgatgaacttggtctccctcctatcggcaagacagagaagaccggtaaacgtagcacttcagcggcggttttagaagctcttcgcgaagtccatcccattgtggacaagatcttgcagtaccgcgaaatggcgaaattgaaaggcacctatattgaccgtcttccggcattagtccacccgaaaacgggacgcctccatacccgcttcaaccaaacagccacggcgaccggtcgtttgtcctcctctgatccaaaccttcagaatattccagtacgtaccccattgggccagaagatccgccgtgcgtttgtagctgaggagggttgggcgttagtggccctcgattatcgtcaaattgaattacgtgtccttgcccatctttctggcgatgagaacctcatccgcgtgtttcaggaaggcaaagacattcacactcaaacggcaagctggatgtttggattatcagctgaagcgatcgatcctttgatgcgtcgtgcagcgaagaccatcaatttcggtgttctctacggtatgagtgcctttcgtttgtcgcaggaattaggcattccctatgaagaagctcaggcgttcattcagaaatactttcaaagctatcccaaagttaaagcatggatcgagaagactctccgtgaaggccgcacacgtggttacgtagagaccttatttggacgtcgccgctatgttcccgatttaaactcgcgcgtgaaaggcaagcgtgaagccgccgaacgcatggcgttcaacatgcctgtacagggcacggcagctgacctcatgaaacttgcaatggtgcgcctttttccacaattgcgtgaagttggtgcccgcatggatttgcaggtccacgatgaactcttgttagaagcgccaaaagagcgtgcggaagaggtggcagccctcgcgaaagaagttatggaaggcgtgtggcccttagcggtgcctcttgaagtcgaagttggtattggcgaggattggctggctgccaaagga

SEQ ID NO: 6598 - protein, 841 aa, synthetic construct
  REGION 1..841: note = Variant of DNA polymerase I from Thermus sp. strain 2.9
MHHHHHHGGSGVLPVFEPKGRVLLVDGHHLAYRNFFALKGLTTSLGEPVQGVYGFAKSLLKALKEDGDVVIVVFDAKAPSFRHEAYEAYKAGRAPTPEDFPRQLALMKELVDLLGLERLEVPGFEADDVLATLAKKAEREGYEVQILTADRDLFQLLSPRISVLHPEGHRITPEWLWEKYGLRPEQWVDFRALAGDPSDNIPGVKGIGEKTALKLLKEWGSLENLLKNLDQVKPESVREKILAHLEDLKLSRELSRVRTDLPLEVDFGRRREPDWEGLKAFLERLEFGSLLHEFGLLESPLLAEEAPWPPPEGAFLGYRLSRPEPMWAELLALAASAQGRVYRAEDPHGALRGLFEVRGLLAKDLAVVALREGLDLPPTDDPMLLAYLLDPSNTTPEGVARRYGGEWTEDAAKRALLAERLHENLLGRLQGEERLLWLYEEVEKPLSRVLAHMEATGVKLDVAYLENLSLEVAAHMRRLEEEVFRLAGRSFRLNSRDQLERVLFDELGLPPIGKTEKTGKRSTSAAVLEALREVHPIVDKILQYREMAKLKGTYIDRLPALVHPKTGRLHTRFNQTATATGRLSSSDPNLQNIPVRTPLGQKIRRAFVAEEGWALVALDYRQIELRVLAHLSGDENLIRVFQEGKDIHTQTASWMFGLSAEAIDPLMRRAAKTINFGVLYGMSAFRLSQELGIPYEEAQAFIQKYFQSYPKVKAWIEKTLREGRTRGYVETLFGRRRYVPDLNSRVKGKREAAERMAFNMPVQGTAADLMKLAMVRLFPQLREVGARMDLQVHDELLLEAPKERAEEVAALAKEVMEGVWPLAVPLEVEVGIGEDWLAAKG

SEQ ID NO: 6599 - DNA, 2523 bp, synthetic construct
  misc_feature 1..2523: note = Variant of DNA polymerase I from Thermus sp. strain 2.9
  source 1..2523: mol_type = other DNA
atgcaccatcatcatcatcatggcggtagcggcgtgttaccggtgttcgagcctaaaggtcgcgtgcttctggttgatggccatcatctcgcgtatcgtaacttctttgccctgaaaggattaaccaccagcctgggcgagccggtacagggtgtctacggctttgcaaagtcgctcctgaaagctctgaaagaagacggtgatgtggtgattgttgtctttgatgcgaaagcgccaagttttcgccacgaagcgtacgaagcttacaaagccgggcgtgctccaacgccggaagactttcctcgccaattggcgcttatgaaggaattagtggatttgcttggcctcgaacgcttggaagttcccggtttcgaggcagacgacgtattagcgactctcgcaaagaaagccgaacgtgagggctatgaagtccagatcttgacagcagatcgcgatcttttccagcttttatctccgcgcatctcggtgttacacccggaagggcatcgtatcaccccggaatggctctgggagaaatatggtttgcgtcccgaacaatgggtggattttcgcgccttagcaggcgatccgagcgacaatattccgggagttaaaggtatcggcgagaagacggcgctcaagctccttaaagaatgggggtcgttggagaacttgcttaagaatttagatcaggtcaaaccagagtcagtgcgtgagaagattcttgctcacctcgaagacctcaaattaagccgcgaattgtcccgtgtacgcaccgatttgccgctcgaagttgatttcggtcgccgccgcgaacctgactgggagggtcttaaagcgtttttagagcgtcttgaatttggttcgctcttgcatgaattcggccttttagaaagcccgttactggccgaagaagcaccttggccaccgcccgagggcgcgtttttaggttaccgtttgagtcgcccggaaccgatgtgggccgaattactggctcttgcagcgtctgcccagggacgtgtgtatcgcgcggaagaccctcatggtgcgctccgcggcctcttcgaagtccgtggcctccttgccaaagacttagctgttgttgcattgcgcgaaggtcttgatttacctccgactgatgatccaatgcttcttgcgtacctcttggacccgtcaaacacgacgcccgaaggcgtagcccgtcgttacggcggcgagtggaccgaagatgcagcgaaacgcgcgttattggccgaacgtttgcacgaaaatttattaggacgtttgcaaggcgaggaacgtctcctctggctttacgaagaagtggagaaaccattgagtcgcgtgctcgcgcatatggaagctaccggtgtcaaattagacgtggcgtatttggagaatctcagccttgaagttgctgcccacatgcgccgcttggaggaagaagtattccgtttagcaggccgttcctttcgccttaactctcgcgatcagttagaacgtgtgttgttcgatgaacttggtctccctcctatcggcaagacagagaagaccggtaaacgtagcacttcagcggcggttttagaagctcttcgcgaagtccatcccattgtggacaagatcttgcagtaccgcgaaatggcgaaattgaaaggcacctatattgaccgtcttccggcattagtccacccgaaaacgggacgcctccatacccgcttcaaccaaacagccacggcgaccggtcgtttgtcctcctctgatccaaaccttcagaatattccagtacgtaccccattgggccagaagatccgccgtgcgtttgtagctgagccgggttggcgtttagtggccctcgattatcgtcaaattgaattacgtgtccttgcccatctttctggcgatgagaacctcatccgcgtgtttcaggaaggcaaagacattcacactcaaacggcaagctggatgtttggattatcagctgaagcgatcgatcctttgatgcgtcgtgcagcgaagaccatcaatttcggtgttctctacggtatgagtgcctttcgtttgtcgcaggaattaggcattcccctggaagaagctcagggtttcattcagaaatactttcaaggctatcccaaagttaaagcatggatcgagaagactctccgtgaaggccgcacacgtggttacgtagagaccttatttggacgtcgccgctatgttcccgatttaaactcgcgcgtgaaaggcaagcgtgaagccgccgaacgcatggcgttcaacatgcctgtacagggcacggcagctgacctcatgaaacttgcaatggtgcgcctttttccacaattgcgtgaagttggtgcccgcatgctgttgcaggtccacgatgaactcttgttagaagcgccaaaagagcgtgcggaagaggtggcagccctcgcgaaagaagttatggaaggcgtgtggcccttagcggtgcctcttgaagtcgaagttggtattggcgaggattggctggctgccaaagga

SEQ ID NO: 6600 - protein, 841 aa, synthetic construct
  REGION 1..841: note = Variant of DNA polymerase I from Thermus sp. strain 2.9
MHHHHHHGGSGVLPVFEPKGRVLLVDGHHLAYRNFFALKGLTTSLGEPVQGVYGFAKSLLKALKEDGDVVIVVFDAKAPSFRHEAYEAYKAGRAPTPEDFPRQLALMKELVDLLGLERLEVPGFEADDVLATLAKKAEREGYEVQILTADRDLFQLLSPRISVLHPEGHRITPEWLWEKYGLRPEQWVDFRALAGDPSDNIPGVKGIGEKTALKLLKEWGSLENLLKNLDQVKPESVREKILAHLEDLKLSRELSRVRTDLPLEVDFGRRREPDWEGLKAFLERLEFGSLLHEFGLLESPLLAEEAPWPPPEGAFLGYRLSRPEPMWAELLALAASAQGRVYRAEDPHGALRGLFEVRGLLAKDLAVVALREGLDLPPTDDPMLLAYLLDPSNTTPEGVARRYGGEWTEDAAKRALLAERLHENLLGRLQGEERLLWLYEEVEKPLSRVLAHMEATGVKLDVAYLENLSLEVAAHMRRLEEEVFRLAGRSFRLNSRDQLERVLFDELGLPPIGKTEKTGKRSTSAAVLEALREVHPIVDKILQYREMAKLKGTYIDRLPALVHPKTGRLHTRFNQTATATGRLSSSDPNLQNIPVRTPLGQKIRRAFVAEPGWRLVALDYRQIELRVLAHLSGDENLIRVFQEGKDIHTQTASWMFGLSAEAIDPLMRRAAKTINFGVLYGMSAFRLSQELGIPLEEAQGFIQKYFQGYPKVKAWIEKTLREGRTRGYVETLFGRRRYVPDLNSRVKGKREAAERMAFNMPVQGTAADLMKLAMVRLFPQLREVGARMLLQVHDELLLEAPKERAEEVAALAKEVMEGVWPLAVPLEVEVGIGEDWLAAKG

SEQ ID NO: 6601 - DNA, 2523 bp, synthetic construct
  misc_feature 1..2523: note = Variant of DNA polymerase I from Thermus sp. strain 2.9
  source 1..2523: mol_type = other DNA
atgcaccatcatcatcatcatggcggtagcggcgtgttaccggtgttcgagcctaaaggtcgcgtgcttctggttgatggccatcatctcgcgtatcgtaacttctttgccctgaaaggattaaccaccagcctgggcgagccggtacagggtgtctacggctttgcaaagtcgctcctgaaagctctgaaagaagacggtgatgtggtgattgttgtctttgatgcgaaagcgccaagttttcgccacgaagcgtacgaagcttacaaagccgggcgtgctccaacgccggaagactttcctcgccaattggcgcttatgaaggaattagtggatttgcttggcctcgaacgcttggaagttcccggtttcgaggcagacgacgtattagcgactctcgcaaagaaagccgaacgtgagggctatgaagtccagatcttgacagcagatcgcgatcttttccagcttttatctccgcgcatctcggtgttacacccggaagggcatcgtatcaccccggaatggctctgggagaaatatggtttgcgtcccgaacaatgggtggattttcgcgccttagcaggcgatccgagcgacaatattccgggagttaaaggtatcggcgagaagacggcgctcaagctccttaaagaatgggggtcgttggagaacttgcttaagaatttagatcaggtcaaaccagagtcagtgcgtgagaagattcttgctcacctcgaagacctcaaattaagccgcgaattgtcccgtgtacgcaccgatttgccgctcgaagttgatttcggtcgccgccgcgaacctgactgggagggtcttaaagcgtttttagagcgtcttgaatttggttcgctcttgcatgaattcggccttttagaaagcccgttactggccgaagaagcaccttggccaccgcccgagggcgcgtttttaggttaccgtttgagtcgcccggaaccgatgtgggccgaattactggctcttgcagcgtctgcccagggacgtgtgtatcgcgcggaagaccctcatggtgcgctccgcggcctcttcgaagtccgtggcctccttgccaaagacttagctgttgttgcattgcgcgaaggtcttgatttacctccgactgatgatccaatgcttcttgcgtacctcttggacccgtcaaacacgacgcccgaaggcgtagcccgtcgttacggcggcgagtggtgggaagatgcaggcaaacgcgcgttattggccgaacgtttgcacgaaaatttattaggacgtttgcaaggcgaggagcgtctcctgtggctttacgaagaagtggagaaaccattgagtcgcgtgctcgcgcatatggaagctaccggtgtcaaattagacgtggcgtatttggagaatctcctgcttgaagttgctgcccacatgcgccgcttggaggaagaagtattccgtttagcaggccgttcctttcgccttaactctcgcgatcagttagaacgtgtgttgttcgatgaacttggtctccctcctatcggcaagacagagaagaccggtaaacgtagcacttcagcggcggttttagaagctcttcgcgaagtccatcccattgtggacaagatcttgcagtaccgcgaaatggcgaaattgaaaggcacctatattgaccgtcttccggcattagtccacccgaaaacgggacgcctccatacccgcttcaaccaaacagccacggcgaccggtcgtttgtcctcctctgatccaaaccttcagaatattccagtacgtaccccattgggccagaagatccgccgtgcgtttgtagctgaggagggttgggcgttagtggccctcgattatcgtcaaattgaattacgtgtccttgcccatctttctggcgatgagaacctcatccgcgtgtttcaggaaggcaaagacattcacactcaaacggcaagctggatgtttggattatcagctgaagcgatcgatcctttgatgcgtcgtgcagcgaagaccatcaatttcggtgttctctacggtatgagtgcctttcgtttgtcgcaggaattaggcattccctatgaagaagctcaggctttcattcagaaatactttcaaagctatcccaaagttaaagcatggatcgagaagactctccgtgaaggccgcacacgtggttacgtagagaccttatttggacgtcgccgctatgttcccgatttaaacgctcgcgtgaaaggcaagcgtgaagccgccgaacgcatggcgttcaacatgcctgtacagggcacggcagctgacctcatgaaacttgcaatggtgcgcctttttccacaattgcgtgaagttggtgcccgcatgctgttgcaggtccacgatgaactcttgttagaagcgccaaaagagcgtgcggaagaggtggcagccctcgcgaaagaagttatggaaggcgtgtggcccttagcggtgcctcttgaagtcgaagttggtattggcgaggattggctggctgccaaagga

SEQ ID NO: 6602 - protein, 841 aa, synthetic construct
  REGION 1..841: note = Variant of DNA polymerase I from Thermus sp. strain 2.9
MHHHHHHGGSGVLPVFEPKGRVLLVDGHHLAYRNFFALKGLTTSLGEPVQGVYGFAKSLLKALKEDGDVVIVVFDAKAPSFRHEAYEAYKAGRAPTPEDFPRQLALMKELVDLLGLERLEVPGFEADDVLATLAKKAEREGYEVQILTADRDLFQLLSPRISVLHPEGHRITPEWLWEKYGLRPEQWVDFRALAGDPSDNIPGVKGIGEKTALKLLKEWGSLENLLKNLDQVKPESVREKILAHLEDLKLSRELSRVRTDLPLEVDFGRRREPDWEGLKAFLERLEFGSLLHEFGLLESPLLAEEAPWPPPEGAFLGYRLSRPEPMWAELLALAASAQGRVYRAEDPHGALRGLFEVRGLLAKDLAVVALREGLDLPPTDDPMLLAYLLDPSNTTPEGVARRYGGEWWEDAGKRALLAERLHENLLGRLQGEERLLWLYEEVEKPLSRVLAHMEATGVKLDVAYLENLLLEVAAHMRRLEEEVFRLAGRSFRLNSRDQLERVLFDELGLPPIGKTEKTGKRSTSAAVLEALREVHPIVDKILQYREMAKLKGTYIDRLPALVHPKTGRLHTRFNQTATATGRLSSSDPNLQNIPVRTPLGQKIRRAFVAEEGWALVALDYRQIELRVLAHLSGDENLIRVFQEGKDIHTQTASWMFGLSAEAIDPLMRRAAKTINFGVLYGMSAFRLSQELGIPYEEAQAFIQKYFQSYPKVKAWIEKTLREGRTRGYVETLFGRRRYVPDLNARVKGKREAAERMAFNMPVQGTAADLMKLAMVRLFPQLREVGARMLLQVHDELLLEAPKERAEEVAALAKEVMEGVWPLAVPLEVEVGIGEDWLAAKG

SEQ ID NO: 6603 - DNA, 2523 bp, synthetic construct
  misc_feature 1..2523: note = Variant of DNA polymerase I from Thermus sp. strain 2.9
  source 1..2523: mol_type = other DNA
atgcaccatcatcatcatcatggcggtagcggcgtgttaccggtgttcgagcctaaaggtcgcgtgcttctggttgatggccatcatctcgcgtatcgtaacttctttgccctgaaaggattaaccaccagcctgggcgagccggtacagggtgtctacggctttgcaaagtcgctcctgaaagctctgaaagaagacggtgatgtggtgattgttgtctttgatgcgaaagcgccaagttttcgccacgaagcgtacgaagcttacaaagccgggcgtgctccaacgccggaagactttcctcgccaattggcgcttatgaaggaattagtggatttgcttggcctcgaacgcttggaagttcccggtttcgaggcagacgacgtattagcgactctcgcaaagaaagccgaacgtgagggctatgaagtccagatcttgacagcagatcgcgatcttttccagcttttatctccgcgcatctcggtgttacacccggaagggcatcgtatcaccccggaatggctctgggagaaatatggtttgcgtcccgaacaatgggtggattttcgcgccttagcaggcgatccgagcgacaatattccgggagttaaaggtatcggcgagaagacggcgctcaagctccttaaagaatgggggtcgttggagaacttgcttaagaatttagatcaggtcaaaccagagtcagtgcgtgagaagattcttgctcacctcgaagacctcaaattaagccgcgaattgtcccgtgtacgcaccgatttgccgctcgaagttgatttcggtcgccgccgcgaacctgactgggagggtcttaaagcgtttttagagcgtcttgaatttggttcgctcttgcatgaattcggccttttagaaagcccgttactggccgaagaagcaccttggccaccgcccgagggcgcgtttttaggttaccgtttgagtcgcccggaaccgatgtgggccgaattactggctcttgcagcgtctgcccagggacgtgtgtatcgcgcggaagaccctcatggtgcgctccgcggcctcttcgaagtccgtaccctccttgccaaagacttagctgttgttgcattgcgcgaaggtcttgatttacctccgactgatgatccaatgcttcttgcgtacctcttggacccgtcaaacacgacgcccgaaggcgtagcccgtcgttacggcggcgagtggaccgaagatgcagccaaacgcgcgttattggccgaacgtttgcacgaaaatttattaggacgtttgcaaggcgaggcgcgtctcctgtggctttacgaagaagtggagaaaccattgagtcgcgtgctcgcgcatatggaagctaccggtgtcaaattagacgtggcgtatttggagaatctcagccttgaagttgctgcccacatgcgccgcttggaggaagaagtattccgtttagcaggccgttcctttcgccttaactctcgcgatcagttagaacgtgtgttgttcgatgaacttggtctccctcctatcggcaagacagagaagaccggtaaacgtagcacttcagcggcggttttagaagctcttcgcgaagtccatcccattgtggacaagatcttgcagtaccgcgaaatggcgaaattgaaaggcacctatattgaccgtcttccggcattagtccacccgaaaacgggacgcctccatacccgcttcaaccaaacagccacggcgaccggtcgtttgtcctcctctgatccaaaccttcagaatattccagtacgtaccccattgggccagaagatccgccgtgcgtttgtagctgaggagggttgggcgttagtggccctcgattatcgtcaaattgaattacgtgtccttgcccatctttctggcgatgagaacctcatccgcgtgtttcaggaaggcaaagacattcacactcaaacggcaagctggatgtttggattatcagctgaagcgatcgatcctttgatgcgtcgtgcagcgaagaccatcaatttcggtgttctctacggtatgagtgcctttcgtttgtcgcaggaattaggcattccctatgaagaagctcaggcgttcattcagaaatactttcaaagctatcccaaagttaaagcatggatcgagaagactctccgtgaaggccgcacacgtggttacgtagagaccttatttggacgtcgccgctatgttcccgatttaaacggtcgcgtgaaaggcaagcgtgaagccgccgaacgcatggcgttcaacatgcctgtacagggcacggcagctgacctcatgaaacttgcaatggtgcgcctttttccacaattgcgtgaagttggtgcccgcatgctgttgcaggtccacgatgaactcttgttagaagcgccaaaagagcgtgcggaagaggtggcagccctcgcgaaagaagttatggaaggcgtgtggcccttagcggtgcctcttgaagtcgaagttggtattggcgaggattggctggctgccaaagga

SEQ ID NO: 6604 - protein, 841 aa, synthetic construct
  REGION 1..841: note = Variant of DNA polymerase I from Thermus sp. strain 2.9
MHHHHHHGGSGVLPVFEPKGRVLLVDGHHLAYRNFFALKGLTTSLGEPVQGVYGFAKSLLKALKEDGDVVIVVFDAKAPSFRHEAYEAYKAGRAPTPEDFPRQLALMKELVDLLGLERLEVPGFEADDVLATLAKKAEREGYEVQILTADRDLFQLLSPRISVLHPEGHRITPEWLWEKYGLRPEQWVDFRALAGDPSDNIPGVKGIGEKTALKLLKEWGSLENLLKNLDQVKPESVREKILAHLEDLKLSRELSRVRTDLPLEVDFGRRREPDWEGLKAFLERLEFGSLLHEFGLLESPLLAEEAPWPPPEGAFLGYRLSRPEPMWAELLALAASAQGRVYRAEDPHGALRGLFEVRTLLAKDLAVVALREGLDLPPTDDPMLLAYLLDPSNTTPEGVARRYGGEWTEDAAKRALLAERLHENLLGRLQGEARLLWLYEEVEKPLSRVLAHMEATGVKLDVAYLENLSLEVAAHMRRLEEEVFRLAGRSFRLNSRDQLERVLFDELGLPPIGKTEKTGKRSTSAAVLEALREVHPIVDKILQYREMAKLKGTYIDRLPALVHPKTGRLHTRFNQTATATGRLSSSDPNLQNIPVRTPLGQKIRRAFVAEEGWALVALDYRQIELRVLAHLSGDENLIRVFQEGKDIHTQTASWMFGLSAEAIDPLMRRAAKTINFGVLYGMSAFRLSQELGIPYEEAQAFIQKYFQSYPKVKAWIEKTLREGRTRGYVETLFGRRRYVPDLNGRVKGKREAAERMAFNMPVQGTAADLMKLAMVRLFPQLREVGARMLLQVHDELLLEAPKERAEEVAALAKEVMEGVWPLAVPLEVEVGIGEDWLAAKG

SEQ ID NO: 6605 - DNA, 2523 bp, synthetic construct
  misc_feature 1..2523: note = Variant of DNA polymerase I from Thermus sp. strain 2.9
  source 1..2523: mol_type = other DNA
atgcaccatcatcatcatcatggcggtagcggcgtgttaccggtgttcgagcctaaaggtcgcgtgcttctggttgatggccatcatctcgcgtatcgtaacttctttgccctgaaaggattaaccaccagcctgggcgagccggtacagggtgtctacggctttgcaaagtcgctcctgaaagctctgaaagaagacggtgatgtggtgattgttgtctttgatgcgaaagcgccaagttttcgccacgaagcgtacgaagcttacaaagccgggcgtgctccaacgccggaagactttcctcgccaattggcgcttatgaaggaattagtggatttgcttggcctcgaacgcttggaagttcccggtttcgaggcagacgacgtattagcgactctcgcaaagaaagccgaacgtgagggctatgaagtccagatcttgacagcagatcgcgatcttttccagcttttatctccgcgcatctcggtgttacacccggaagggcatcgtatcaccccggaatggctctgggagaaatatggtttgcgtcccgaacaatgggtggattttcgcgccttagcaggcgatccgagcgacaatattccgggagttaaaggtatcggcgagaagacggcgctcaagctccttaaagaatgggggtcgttggagaacttgcttaagaatttagatcaggtcaaaccagagtcagtgcgtgagaagattcttgctcacctcgaagacctcaaattaagccgcgaattgtcccgtgtacgcaccgatttgccgctcgaagttgatttcggtcgccgccgcgaacctgactgggagggtcttaaagcgtttttagagcgtcttgaatttggttcgctcttgcatgaattcggccttttagaaagcccgttactggccgaagaagcaccttggccaccgcccgagggcgcgtttttaggttaccgtttgagtcgcccggaaccgatgtgggccgaattactggctcttgcagcgtctgcccagggacgtgtgtatcgcgcggaagaccctcatggtgcgctccgcggcctcttcgaagtccgtggactccttgccaaagacttagctgttgttgcattgcgcgaaggtcttgatttacctccgactgatgatccaatgcttcttgcgtacctcttggacccgtcaaacacgacgcccgaaggcgtagcccgtcgttacggcggcgagtggaccgaagatgcagcgaaacgcgcgttattggccgaacgtttgcacgaaaatttattaggacgtttgcaaggcgaggaacgtctcctctggctttacgaagaagtggagaaaccattgagtcgcgtgctcgcgcatatggaagctaccggtgtcaaattagacgtggcgtatttggagaatctcagccttgaagttgctgcccacatgcgccgcttggaggaagaagtattccgtttagcaggccgttcctttcgccttaactctcgcgatcagttagaacgtgtgttgttcgatgaacttggtctccctcctatcggcaagacagagaagaccggtaaacgtagcacttcagcggcggttttagaagctcttcgcgaagtccatcccattgtggacaagatcttgcagtaccgcgaaatggcgaaattgaaaggcacctatattgaccgtcttccggcattagtccacccgaaaacgggacgcctccatacccgcttcaaccaaacagccacggcgaccggtcgtttgtcctcctctgatccaaaccttcagaatattccagtacgtaccccattgggccagaagatccgccgtgcgtttgtagctgagccgggttgggcgttagtggccctcgattatcgtcaaattgaattacgtgtccttgcccatctttctggcgatgagaacctcatccgcgtgtttcaggaaggcaaagacattcacactcaaacggcaagctggatgtttggattatcagctgaagcgatcgatcctttgatgcgtcgtgcagcgaagaccatcaatttcggtgttctctacggtatgagtgcctttcgtttgtcgcaggaattaggcattccctatgaagaagctcaggcgttcattcagaaatactttcaaggctatcccaaagttaaagcatggatcgagaagactctccgtgaaggccgcacacgtggttacgtagagaccttatttggacgtcgccgctatgttcccgatttaaactcgcgcgtgaaaggcaagcgtgaagccgccgaacgcatggcgttcaacatgcctgtacagggcacggcagctgacctcatgaaacttgcaatggtgcgcctttttccacaattgcgtgaagttggtgcccgcatgctgttgcaggtccacgatgaactcttgttagaagcgccaaaagagcgtgcggaagaggtggcagccctcgcgaaagaagttatggaaggcgtgtggcccttagcggtgcctcttgaagtcgaagttggtattggcgaggattggctggctgccaaagga

SEQ ID NO: 6606 - protein, 841 aa, synthetic construct
  REGION 1..841: note = Variant of DNA polymerase I from Thermus sp. strain 2.9
MHHHHHHGGSGVLPVFEPKGRVLLVDGHHLAYRNFFALKGLTTSLGEPVQGVYGFAKSLLKALKEDGDVVIVVFDAKAPSFRHEAYEAYKAGRAPTPEDFPRQLALMKELVDLLGLERLEVPGFEADDVLATLAKKAEREGYEVQILTADRDLFQLLSPRISVLHPEGHRITPEWLWEKYGLRPEQWVDFRALAGDPSDNIPGVKGIGEKTALKLLKEWGSLENLLKNLDQVKPESVREKILAHLEDLKLSRELSRVRTDLPLEVDFGRRREPDWEGLKAFLERLEFGSLLHEFGLLESPLLAEEAPWPPPEGAFLGYRLSRPEPMWAELLALAASAQGRVYRAEDPHGALRGLFEVRGLLAKDLAVVALREGLDLPPTDDPMLLAYLLDPSNTTPEGVARRYGGEWTEDAAKRALLAERLHENLLGRLQGEERLLWLYEEVEKPLSRVLAHMEATGVKLDVAYLENLSLEVAAHMRRLEEEVFRLAGRSFRLNSRDQLERVLFDELGLPPIGKTEKTGKRSTSAAVLEALREVHPIVDKILQYREMAKLKGTYIDRLPALVHPKTGRLHTRFNQTATATGRLSSSDPNLQNIPVRTPLGQKIRRAFVAEPGWALVALDYRQIELRVLAHLSGDENLIRVFQEGKDIHTQTASWMFGLSAEAIDPLMRRAAKTINFGVLYGMSAFRLSQELGIPYEEAQAFIQKYFQGYPKVKAWIEKTLREGRTRGYVETLFGRRRYVPDLNSRVKGKREAAERMAFNMPVQGTAADLMKLAMVRLFPQLREVGARMLLQVHDELLLEAPKERAEEVAALAKEVMEGVWPLAVPLEVEVGIGEDWLAAKG

SEQ ID NO: 6607 - DNA, 2523 bp, synthetic construct
  misc_feature 1..2523: note = Variant of DNA polymerase I from Thermus sp. strain 2.9
  source 1..2523: mol_type = other DNA
atgcaccatcatcatcatcatggcggtagcggcgtgttaccggtgttcgagcctaaaggtcgcgtgcttctggttgatggccatcatctcgcgtatcgtaacttctttgccctgaaaggattaaccaccagcctgggcgagccggtacagggtgtctacggctttgcaaagtcgctcctgaaagctctgaaagaagacggtgatgtggtgattgttgtctttgatgcgaaagcgccaagttttcgccacgaagcgtacgaagcttacaaagccgggcgtgctccaacgccggaagactttcctcgccaattggcgcttatgaaggaattagtggatttgcttggcctcgaacgcttggaagttcccggtttcgaggcagacgacgtattagcgactctcgcaaagaaagccgaacgtgagggctatgaagtccagatcttgacagcagatcgcgatcttttccagcttttatctccgcgcatctcggtgttacacccggaagggcatcgtatcaccccggaatggctctgggagaaatatggtttgcgtcccgaacaatgggtggattttcgcgccttagcaggcgatccgagcgacaatattccgggagttaaaggtatcggcgagaagacggcgctcaagctccttaaagaatgggggtcgttggagaacttgcttaagaatttagatcaggtcaaaccagagtcagtgcgtgagaagattcttgctcacctcgaagacctcaaattaagccgcgaattgtcccgtgtacgcaccgatttgccgctcgaagttgatttcggtcgccgccgcgaacctgactgggagggtcttaaagcgtttttagagcgtcttgaatttggttcgctcttgcatgaattcggccttttagaaagcccgttactggccgaagaagcaccttggccaccgcccgagggcgcgtttttaggttaccgtttgagtcgcccggaaccgatgtgggccgaattactggctcttgcagcgtctgcccagggacgtgtgtatcgcgcggaagaccctcatggtgcgctccgcggcctcttcgaagtccgtaccctccttgccaaagacttagctgttgttgcattgcgcgaaggtcttgatttacctccgactgatgatccaatgcttcttgcgtacctcttggacccgtcaaacacgacgcccgaaggcgtagcccgtcgttacggcggcgagtggaccgaagatgcagcgaaacgcgcgttattggccgaacgtttgcacgaaaatttattaggacgtttgcaaggcgaggaacgtctcctctggctttacgaagaagtggagaaaccattgagtcgcgtgctcgcgcatatggaagctaccggtgtcaaattagacgtggcgtatttggagaatctcctgcttgaagttgctgcccacatgcgccgcttggaggaagaagtattccgtttagcaggccgttcctttcgccttaactctcgcgatcagttagaacgtgtgttgttcgatgaacttggtctccctcctatcggcaagacagagaagaccggtaaacgtagcacttcagcggcggttttagaagctcttcgcgaagtccatcccattgtggacaagatcttgcagtaccgcgaaatggcgaaattgaaaggcacctatattgaccgtcttccggcattagtccacccgaaaacgggacgcctccatacccgcttcaaccaaacagccacggcgaccggtcgtttgtcctcctctgatccaaaccttcagaatattccagtacgtaccccattgggccagaagatccgccgtgcgtttgtagctgaggagggttgggcgttagtggccctcgattatcgtcaaattgaattacgtgtccttgcccatctttctggcgatgagaacctcatccgcgtgtttcaggaaggcaaagacattcacactcaaacggcaagctggatgtttggattatcagctgaagcgatcgatcctttgatgcgtcgtgcagcgaagaccatcaatttcggtgttctctacggtatgagtgcctttcgtttgtcgcaggaattaggcattccctatgaagaagctcagggtttcattcagaaatactttcaaagctatcccaaagttaaagcatggatcgagaagactctccgtgaaggccgcacacgtggttacgtagagaccttatttggacgtcgccgctatgttcccgatttaaacggtcgcgtgaaaggcaagcgtgaagccgccgaacgcatggcgttcaacatgcctgtacagggcacggcagctgacctcatgaaacttgcaatggtgcgcctttttccacaattgcgtgaagttggtgcccgcatgctgttgcaggtccacgatgaactcttgttagaagcgccaaaagagcgtgcggaagaggtggcagccctcgcgaaagaagttatggaaggcgtgtggcccttagcggtgcctcttgaagtcgaagttggtattggcgaggattggctggctgccaaagga

SEQ ID NO: 6608 - protein, 841 aa, synthetic construct
  REGION 1..841: note = Variant of DNA polymerase I from Thermus sp. strain 2.9
MHHHHHHGGSGVLPVFEPKGRVLLVDGHHLAYRNFFALKGLTTSLGEPVQGVYGFAKSLLKALKEDGDVVIVVFDAKAPSFRHEAYEAYKAGRAPTPEDFPRQLALMKELVDLLGLERLEVPGFEADDVLATLAKKAEREGYEVQILTADRDLFQLLSPRISVLHPEGHRITPEWLWEKYGLRPEQWVDFRALAGDPSDNIPGVKGIGEKTALKLLKEWGSLENLLKNLDQVKPESVREKILAHLEDLKLSRELSRVRTDLPLEVDFGRRREPDWEGLKAFLERLEFGSLLHEFGLLESPLLAEEAPWPPPEGAFLGYRLSRPEPMWAELLALAASAQGRVYRAEDPHGALRGLFEVRTLLAKDLAVVALREGLDLPPTDDPMLLAYLLDPSNTTPEGVARRYGGEWTEDAAKRALLAERLHENLLGRLQGEERLLWLYEEVEKPLSRVLAHMEATGVKLDVAYLENLLLEVAAHMRRLEEEVFRLAGRSFRLNSRDQLERVLFDELGLPPIGKTEKTGKRSTSAAVLEALREVHPIVDKILQYREMAKLKGTYIDRLPALVHPKTGRLHTRFNQTATATGRLSSSDPNLQNIPVRTPLGQKIRRAFVAEEGWALVALDYRQIELRVLAHLSGDENLIRVFQEGKDIHTQTASWMFGLSAEAIDPLMRRAAKTINFGVLYGMSAFRLSQELGIPYEEAQGFIQKYFQSYPKVKAWIEKTLREGRTRGYVETLFGRRRYVPDLNGRVKGKREAAERMAFNMPVQGTAADLMKLAMVRLFPQLREVGARMLLQVHDELLLEAPKERAEEVAALAKEVMEGVWPLAVPLEVEVGIGEDWLAAKG

SEQ ID NO: 6609 - DNA, 2523 bp, synthetic construct
  misc_feature 1..2523: note = Variant of DNA polymerase I from Thermus sp. strain 2.9
  source 1..2523: mol_type = other DNA
atgcaccatcatcatcatcatggcggtagcggcgtgttaccggtgttcgagcctaaaggtcgcgtgcttctggttgatggccatcatctcgcgtatcgtaacttctttgccctgaaaggattaaccaccagcctgggcgagccggtacagggtgtctacggctttgcaaagtcgctcctgaaagctctgaaagaagacggtgatgtggtgattgttgtctttgatgcgaaagcgccaagttttcgccacgaagcgtacgaagcttacaaagccgggcgtgctccaacgccggaagactttcctcgccaattggcgcttatgaaggaattagtggatttgcttggcctcgaacgcttggaagttcccggtttcgaggcagacgacgtattagcgactctcgcaaagaaagccgaacgtgagggctatgaagtccagatcttgacagcagatcgcgatcttttccagcttttatctccgcgcatctcggtgttacacccggaagggcatcgtatcaccccggaatggctctgggagaaatatggtttgcgtcccgaacaatgggtggattttcgcgccttagcaggcgatccgagcgacaatattccgggagttaaaggtatcggcgagaagacggcgctcaagctccttaaagaatgggggtcgttggagaacttgcttaagaatttagatcaggtcaaaccagagtcagtgcgtgagaagattcttgctcacctcgaagacctcaaattaagccgcgaattgtcccgtgtacgcaccgatttgccgctcgaagttgatttcggtcgccgccgcgaacctgactgggagggtcttaaagcgtttttagagcgtcttgaatttggttcgctcttgcatgaattcggccttttagaaagcccgttactggccgaagaagcaccttggccaccgcccgagggcgcgtttttaggttaccgtttgagtcgcccggaaccgatgtgggccgaattactggctcttgcagcgtctgcccagggacgtgtgtatcgcgcggaagaccctcatggtgcgctccgcggcctcttcgaagtccgtggcctccttgccaaagacttagctgttgttgcattgcgcgaaggtcttgatttacctccgactgatgatccaatgcttcttgcgtacctcttggacccgtcaaacacgacgcccgaaggcgtagcccgtcgttacggcggcgagtggaccgaagatgcagcgaaacgcgcgttattggccgaacgtttgcacgaaaatttattaggacgtttgcaaggcgaggagcgtctccgttggctttacgaagaagtggagaaaccattgagtcgcgtgctcgcgcatatggaagctaccggtgtcaaattagacgtggcgtatttggagaatctcagccttgaagttgctgcccacatgcgccgcttggaggaagaagtattccgtttagcaggccgttcctttcgccttaactctcgcgatcagttagaacgtgtgttgttcgatgaacttggtctccctcctatcggcaagacagagaagaccggtaaacgtagcacttcagcggcggttttagaagctcttcgcgaagtccatcccattgtggacaagatcttgcagtaccgcgaaatggcgaaattgaaaggcacctatattgaccgtcttccggcattagtccacccgaaaacgggacgcctccatacccgcttcaaccaaacagccacggcgaccggtcgtttgtcctcctctgatccaaaccttcagaatattccagtacgtaccccattgggccagaagatccgccgtgcgtttgtagctgagccgggttgggcgttagtggccctcgattatcgtcaaattgaattacgtgtccttgcccatctttctggcgatgagaacctcatccgcgtgtttcaggaaggcaaagacattcacactcaaacggcaagctggatgtttggattatcagctgaagcgatcgatcctttgatgcgtcgtgcagcgaagaccatcaatttcggtgttctctacggtatgagtgcctttcgtttgtcgcaggaattaggcattccctatgaagaagctcaggcgttcattcagaaatactttcaaagctatcccaaagttaaagcatggatcgagaagactctccgtgaaggccgcacacgtggttacgtagagaccttatttggacgtcgccgctatgttcccgatttaaacgctcgcgtgaaaggcaagcgtgaagccgccgaacgcatggcgttcaacatgcctgtacagggcacggcagctgacctcatgaaacttgcaatggtgcgcctttttccacaattgcgtgaagttggtgcccgcatgctcttgcaggtccacgatgaactcttgttagaagcgccaaaagagcgtgcggaagaggtggcagccctcgcgaaagaagttatggaaggcgtgtggcccttagcggtgcctcttgaagtcgaagttggtattggcgaggattggctggctgccaaagga

SEQ ID NO: 6610 - protein, 841 aa, synthetic construct
  REGION 1..841: note = Variant of DNA polymerase I from Thermus sp. strain 2.9
MHHHHHHGGSGVLPVFEPKGRVLLVDGHHLAYRNFFALKGLTTSLGEPVQGVYGFAKSLLKALKEDGDVVIVVFDAKAPSFRHEAYEAYKAGRAPTPEDFPRQLALMKELVDLLGLERLEVPGFEADDVLATLAKKAEREGYEVQILTADRDLFQLLSPRISVLHPEGHRITPEWLWEKYGLRPEQWVDFRALAGDPSDNIPGVKGIGEKTALKLLKEWGSLENLLKNLDQVKPESVREKILAHLEDLKLSRELSRVRTDLPLEVDFGRRREPDWEGLKAFLERLEFGSLLHEFGLLESPLLAEEAPWPPPEGAFLGYRLSRPEPMWAELLALAASAQGRVYRAEDPHGALRGLFEVRGLLAKDLAVVALREGLDLPPTDDPMLLAYLLDPSNTTPEGVARRYGGEWTEDAAKRALLAERLHENLLGRLQGEERLRWLYEEVEKPLSRVLAHMEATGVKLDVAYLENLSLEVAAHMRRLEEEVFRLAGRSFRLNSRDQLERVLFDELGLPPIGKTEKTGKRSTSAAVLEALREVHPIVDKILQYREMAKLKGTYIDRLPALVHPKTGRLHTRFNQTATATGRLSSSDPNLQNIPVRTPLGQKIRRAFVAEPGWALVALDYRQIELRVLAHLSGDENLIRVFQEGKDIHTQTASWMFGLSAEAIDPLMRRAAKTINFGVLYGMSAFRLSQELGIPYEEAQAFIQKYFQSYPKVKAWIEKTLREGRTRGYVETLFGRRRYVPDLNARVKGKREAAERMAFNMPVQGTAADLMKLAMVRLFPQLREVGARMLLQVHDELLLEAPKERAEEVAALAKEVMEGVWPLAVPLEVEVGIGEDWLAAKG

SEQ ID NO: 6611 - DNA, 2523 bp, synthetic construct
  misc_feature 1..2523: note = Variant of DNA polymerase I from Thermus sp. strain 2.9
  source 1..2523: mol_type = other DNA
atgcaccatcatcatcatcatggcggtagcggcgtgttaccggtgttcgagcctaaaggtcgcgtgcttctggttgatggccatcatctcgcgtatcgtaacttctttgccctgaaaggattaaccaccagcctgggcgagccggtacagggtgtctacggctttgcaaagtcgctcctgaaagctctgaaagaagacggtgatgtggtgattgttgtctttgatgcgaaagcgccaagttttcgccacgaagcgtacgaagcttacaaagccgggcgtgctccaacgccggaagactttcctcgccaattggcgcttatgaaggaattagtggatttgcttggcctcgaacgcttggaagttcccggtttcgaggcagacgacgtattagcgactctcgcaaagaaagccgaacgtgagggctatgaagtccagatcttgacagcagatcgcgatcttttccagcttttatctccgcgcatctcggtgttacacccggaagggcatcgtatcaccccggaatggctctgggagaaatatggtttgcgtcccgaacaatgggtggattttcgcgccttagcaggcgatccgagcgacaatattccgggagttaaaggtatcggcgagaagacggcgctcaagctccttaaagaatgggggtcgttggagaacttgcttaagaatttagatcaggtcaaaccagagtcagtgcgtgagaagattcttgctcacctcgaagacctcaaattaagccgcgaattgtcccgtgtacgcaccgatttgccgctcgaagttgatttcggtcgccgccgcgaacctgactgggagggtcttaaagcgtttttagagcgtcttgaatttggttcgctcttgcatgaattcggccttttagaaagcccgttactggccgaagaagcaccttggccaccgcccgagggcgcgtttttaggttaccgtttgagtcgcccggaaccgatgtgggccgaattactggctcttgcagcgtctgcccagggacgtgtgtatcgcgcggaagaccctcatggtgcgctccgcggcctcttcgaagtccgtggcctccttgccaaagacttagctgttgttgcattgcgcgaaggtcttgatttacctccgactgatgatccaatgcttcttgcgtacctcttggacccgtcaaacacgacgcccgaaggcgtagcccgtcgttacggcggcgagtggaccgaagatgcagcgaaacgcgcgttattggccgaacgtttgcacgaaaatttattaggacgtttgcaaggcgaggaacgtctcctctggctttacgaagaagtggagaaaccattgagtcgcgtgctcgcgcatatggaagctaccggtgtcaaattagacgtggcgtatttggagaatctcagccttgaagttgctgcccacatgcgccgcttggaggaagaagtattccgtttagcaggccgttcctttcgccttaactctcgcgatcagttagaacgtgtgttgttcgatgaacttggtctccctcctatcggcaagacagagaagaccggtaaacgtagcacttcagcggcggttttagaagctcttcgcgaagtccatcccattgtggacaagatcttgcagtaccgcgaaatggcgaaattgaaaggcacctatattgaccgtcttccggcattagtccacccgaaaacgggacgcctccatacccgcttcaaccaaacagccacggcgaccggtcgtttgtcctcctctgatccaaaccttcagaatattccagtacgtaccccattgggccagaagatccgccgtgcgtttgtagctgaggagggttggcgtttagtggccctcgattatcgtcaaattgaattacgtgtccttgcccatctttctggcgatgagaacctcatccgcgtgtttcaggaaggcaaagacattcacactcaaacggcaagctggatgtttggattatcagctgaagcgatcgatcctttgatgcgtcgtgcagcgaagaccatcaatttcggtgttctctacggtatgagtgcctttcgtttgtcgcaggaattaggcattccctatgaagaagctcaggctttcattcagaaatactttcaaagctatcccaaagttaaagcatggatcgagaagactctccgtgaaggccgcacacgtggttacgtagagaccttatttggacgtcgccgctatgttcccgatttaaacggtcgcgtgaaaggcaagcgtgaagccgccgaacgcatggcgttcaacatgcctgtacagggcacggcagctgacctcatgaaacttgcaatggtgcgcctttttccacaattgcgtgaagttggtgcccgcatgctgttgcaggtccacgatgaactcttgttagaagcgccaaaagagcgtgcggaagaggtggcagccctcgcgaaagaagttatggaaggcgtgtggcccttagcggtgcctcttgaagtcgaagttggtattggcgaggattggctggctgccaaagga

SEQ ID NO: 6612 - protein, 841 aa, synthetic construct; identical to SEQ ID NO: 5108
  REGION 1..841: note = Variant of DNA polymerase I from Thermus sp. strain 2.9

SEQ ID NO: 6613 - DNA, 2523 bp, synthetic construct
  misc_feature 1..2523: note = Variant of DNA polymerase I from Thermus sp. strain 2.9
  source 1..2523: mol_type = other DNA
atgcaccatcatcatcatcatggcggtagcggcgtgttaccggtgttcgagcctaaaggtcgcgtgcttctggttgatggccatcatctcgcgtatcgtaacttctttgccctgaaaggattaaccaccagcctgggcgagccggtacagggtgtctacggctttgcaaagtcgctcctgaaagctctgaaagaagacggtgatgtggtgattgttgtctttgatgcgaaagcgccaagttttcgccacgaagcgtacgaagcttacaaagccgggcgtgctccaacgccggaagactttcctcgccaattggcgcttatgaaggaattagtggatttgcttggcctcgaacgcttggaagttcccggtttcgaggcagacgacgtattagcgactctcgcaaagaaagccgaacgtgagggctatgaagtccagatcttgacagcagatcgcgatcttttccagcttttatctccgcgcatctcggtgttacacccggaagggcatcgtatcaccccggaatggctctgggagaaatatggtttgcgtcccgaacaatgggtggattttcgcgccttagcaggcgatccgagcgacaatattccgggagttaaaggtatcggcgagaagacggcgctcaagctccttaaagaatgggggtcgttggagaacttgcttaagaatttagatcaggtcaaaccagagtcagtgcgtgagaagattcttgctcacctcgaagacctcaaattaagccgcgaattgtcccgtgtacgcaccgatttgccgctcgaagttgatttcggtcgccgccgcgaacctgactgggagggtcttaaagcgtttttagagcgtcttgaatttggttcgctcttgcatgaattcggccttttagaaagcccgttactggccgaagaagcaccttggccaccgcccgagggcgcgtttttaggttaccgtttgagtcgcccggaaccgatgtgggccgaattactggctcttgcagcgtctgcccagggacgtgtgtatcgcgcggaagaccctcatggtgcgctccgcggcctcttcgaagtccgtggcctccttgccaaagacttagctgttgttgcattgcgcgaaggtcttgatttacctccgactgatgatccaatgcttcttgcgtacctcttggacccgtcaaacacgacgcccgaaggcgtagcccgtcgttacggcggcgagtggaccgaagatgcagcgaaacgcgcgttattggccgaacgtttgcacgaaaatttattaggacgtttgcaaggcgaggaacgtctcctgtggctttacgaagaagtggagaaaccattgagtcgcgtgctcgcgcatatggaagctaccggtgtcaaattagacgtggcgtatttggagaatctcagccttgaagttgctgcccacatgcgccgcttggaggaagaagtattccgtttagcaggccgttcctttcgccttaactctcgcgatcagttagaacgtgtgttgttcgatgaacttggtctccctcctatcggcaagacagagaagaccggtaaacgtagcacttcagcggcggttttagaagctcttcgcgaagtccatcccattgtggacaagatcttgcagtaccgcgaaatggcgaaattgaaaggcacctatattgaccgtcttccggcattagtccacccgaaaacgggacgcctccatacccgcttcaaccaaacagccacggcgaccggtcgtttgtcctcctctgatccaaaccttcagaatattccagtacgtaccccattgggccagaagatccgccgtgcgtttgtagctgagccgggttggcgtttagtggccctcgattatcgtcaaattgaattacgtgtccttgcccatctttctggcgatgagaacctcatccgcgtgtttcaggaaggcaaagacattcacactcaaacggcaagctggatgtttggattatcagctgaagcgatcgatcctttgatgcgtcgtgcagcgaagaccatcaatttcggtgttctctacggtatgagtgcctttcgtttgtcgcaggaattaggcattccctatgaagaagctcaggcgttcattcagaaatactttcaaagctatcccaaagttaaagcatggatcgagaagactctccgtgaaggccgcacacgtggttacgtagagaccttatttggacgtcgccgctatgttcccgatttaaacgctcgcgtgaaaggcaagcgtgaagccgccgaacgcatggcgttcaacatgcctgtacagggcacggcagctgacctcatgaaacttgcaatggtgcgcctttttccacaattgcgtgaagttggtgcccgcatgctgttgcaggtccacgatgaactcttgttagaagcgccaaaagagcgtgcggaagaggtggcagccctcgcgaaagaagttatggaaggcgtgtggcccttagcggtgcctcttgaagtcgaagttggtattggcgaggattggctggctgccaaagga

SEQ ID NO: 6614 - protein, 841 aa, synthetic construct; identical to SEQ ID NO: 5118
  REGION 1..841: note = Variant of DNA polymerase I from Thermus sp. strain 2.9

SEQ ID NO: 6615 - DNA, 2523 bp, synthetic construct
  misc_feature 1..2523: note = Variant of DNA polymerase I from Thermus sp. strain 2.9
  source 1..2523: mol_type = other DNA
atgcaccatcatcatcatcatggcggtagcggcgtgttaccggtgttcgagcctaaaggtcgcgtgcttctggttgatggccatcatctcgcgtatcgtaacttctttgccctgaaaggattaaccaccagcctgggcgagccggtacagggtgtctacggctttgcaaagtcgctcctgaaagctctgaaagaagacggtgatgtggtgattgttgtctttgatgcgaaagcgccaagttttcgccacgaagcgtacgaagcttacaaagccgggcgtgctccaacgccggaagactttcctcgccaattggcgcttatgaaggaattagtggatttgcttggcctcgaacgcttggaagttcccggtttcgaggcagacgacgtattagcgactctcgcaaagaaagccgaacgtgagggctatgaagtccagatcttgacagcagatcgcgatcttttccagcttttatctccgcgcatctcggtgttacacccggaagggcatcgtatcaccccggaatggctctgggagaaatatggtttgcgtcccgaacaatgggtggattttcgcgccttagcaggcgatccgagcgacaatattccgggagttaaaggtatcggcgagaagacggcgctcaagctccttaaagaatgggggtcgttggagaacttgcttaagaatttagatcaggtcaaaccagagtcagtgcgtgagaagattcttgctcacctcgaagacctcaaattaagccgcgaattgtcccgtgtacgcaccgatttgccgctcgaagttgatttcggtcgccgccgcgaacctgactgggagggtcttaaagcgtttttagagcgtcttgaatttggttcgctcttgcatgaattcggccttttagaaagcccgttactggccgaagaagcaccttggccaccgcccgagggcgcgtttttaggttaccgtttgagtcgcccggaaccgatgtgggccgaattactggctcttgcagcgtctgcccagggacgtgtgtatcgcgcggaagaccctcatggtgcgctccgcggcctcttcgaagtccgtggcctccttgccaaagacttagctgttgttgcattgcgcgaaggtcttgatttacctccgactgatgatccaatgcttcttgcgtacctcttggacccgtcaaacacgacgcccgaaggcgtagcccgtcgttacggcggcgagtggtgggaagatgcagccaaacgcgcgttattggccgaacgtttgcacgaaaatttattaggacgtttgcaaggcgaggcgcgtctccgttggctttacgaagaagtggagaaaccattgagtcgcgtgctcgcgcatatggaagctaccggtgtcaaattagacgtggcgtatttggagaatctcagccttgaagttgctgcccacatgcgccgcttggaggaagaagtattccgtttagcaggccgttcctttcgccttaactctcgcgatcagttagaacgtgtgttgttcgatgaacttggtctccctcctatcggcaagacagagaagaccggtaaacgtagcacttcagcggcggttttagaagctcttcgcgaagtccatcccattgtggacaagatcttgcagtaccgcgaaatggcgaaattgaaaggcacctatattgaccgtcttccggcattagtccacccgaaaacgggacgcctccatacccgcttcaaccaaacagccacggcgaccggtcgtttgtcctcctctgatccaaaccttcagaatattccagtacgtaccccattgggccagaagatccgccgtgcgtttgtagctgaggagggttgggcgttagtggccctcgattatcgtcaaattgaattacgtgtccttgcccatctttctggcgatgagaacctcatccgcgtgtttcaggaaggcaaagacattcacactcaaacggcaagctggatgtttggattatcagctgaagcgatcgatcctttgatgcgtcgtgcagcgaagaccatcaatttcggtgttctctacggtatgagtgcctttcgtttgtcgcaggaattaggcattcccctggaagaagctcaggctttcattcagaaatactttcaaggctatcccaaagttaaagcatggatcgagaagactctccgtgaaggccgcacacgtggttacgtagagaccttatttggacgtcgccgctatgttcccgatttaaactcgcgcgtgaaaggcaagcgtgaagccgccgaacgcatggcgttcaacatgcctgtacagggcacggcagctgacctcatgaaacttgcaatggtgcgcctttttccacaattgcgtgaagttggtgcccgcatgctgttgcaggtccacgatgaactcttgttagaagcgccaaaagagcgtgcggaagaggtggcagccctcgcgaaagaagttatggaaggcgtgtggcccttagcggtgcctcttgaagtcgaagttggtattggcgaggattggctggctgccaaagga

SEQ ID NO: 6616 - protein, 841 aa, synthetic construct
  REGION 1..841: note = Variant of DNA polymerase I from Thermus sp. strain 2.9
MHHHHHHGGSGVLPVFEPKGRVLLVDGHHLAYRNFFALKGLTTSLGEPVQGVYGFAKSLLKALKEDGDVVIVVFDAKAPSFRHEAYEAYKAGRAPTPEDFPRQLALMKELVDLLGLERLEVPGFEADDVLATLAKKAEREGYEVQILTADRDLFQLLSPRISVLHPEGHRITPEWLWEKYGLRPEQWVDFRALAGDPSDNIPGVKGIGEKTALKLLKEWGSLENLLKNLDQVKPESVREKILAHLEDLKLSRELSRVRTDLPLEVDFGRRREPDWEGLKAFLERLEFGSLLHEFGLLESPLLAEEAPWPPPEGAFLGYRLSRPEPMWAELLALAASAQGRVYRAEDPHGALRGLFEVRGLLAKDLAVVALREGLDLPPTDDPMLLAYLLDPSNTTPEGVARRYGGEWWEDAAKRALLAERLHENLLGRLQGEARLRWLYEEVEKPLSRVLAHMEATGVKLDVAYLENLSLEVAAHMRRLEEEVFRLAGRSFRLNSRDQLERVLFDELGLPPIGKTEKTGKRSTSAAVLEALREVHPIVDKILQYREMAKLKGTYIDRLPALVHPKTGRLHTRFNQTATATGRLSSSDPNLQNIPVRTPLGQKIRRAFVAEEGWALVALDYRQIELRVLAHLSGDENLIRVFQEGKDIHTQTASWMFGLSAEAIDPLMRRAAKTINFGVLYGMSAFRLSQELGIPLEEAQAFIQKYFQGYPKVKAWIEKTLREGRTRGYVETLFGRRRYVPDLNSRVKGKREAAERMAFNMPVQGTAADLMKLAMVRLFPQLREVGARMLLQVHDELLLEAPKERAEEVAALAKEVMEGVWPLAVPLEVEVGIGEDWLAAKG

SEQ ID NO: 6617 - DNA, 2523 bp, synthetic construct
  misc_feature 1..2523: note = Variant of DNA polymerase I from Thermus sp. strain 2.9
  source 1..2523: mol_type = other DNA
atgcaccatcatcatcatcatggcggtagcggcgtgttaccggtgttcgagcctaaaggtcgcgtgcttctggttgatggccatcatctcgcgtatcgtaacttctttgccctgaaaggattaaccaccagcctgggcgagccggtacagggtgtctacggctttgcaaagtcgctcctgaaagctctgaaagaagacggtgatgtggtgattgttgtctttgatgcgaaagcgccaagttttcgccacgaagcgtacgaagcttacaaagccgggcgtgctccaacgccggaagactttcctcgccaattggcgcttatgaaggaattagtggatttgcttggcctcgaacgcttggaagttcccggtttcgaggcagacgacgtattagcgactctcgcaaagaaagccgaacgtgagggctatgaagtccagatcttgacagcagatcgcgatcttttccagcttttatctccgcgcatctcggtgttacacccggaagggcatcgtatcaccccggaatggctctgggagaaatatggtttgcgtcccgaacaatgggtggattttcgcgccttagcaggcgatccgagcgacaatattccgggagttaaaggtatcggcgagaagacggcgctcaagctccttaaagaatgggggtcgttggagaacttgcttaagaatttagatcaggtcaaaccagagtcagtgcgtgagaagattcttgctcacctcgaagacctcaaattaagccgcgaattgtcccgtgtacgcaccgatttgccgctcgaagttgatttcggtcgccgccgcgaacctgactgggagggtcttaaagcgtttttagagcgtcttgaatttggttcgctcttgcatgaattcggccttttagaaagcccgttactggccgaagaagcaccttggccaccgcccgagggcgcgtttttaggttaccgtttgagtcgcccggaaccgatgtgggccgaattactggctcttgcagcgtctgcccagggacgtgtgtatcgcgcggaagaccctcatggtgcgctccgcggcctcttcgaagtccgtaccctccttgccaaagacttagctgttgttgcattgcgcgaaggtcttgatttacctccgactgatgatccaatgcttcttgcgtacctcttggacccgtcaaacacgacgcccgaaggcgtagcccgtcgttacggcggcgagtggaccgaagatgcagccaaacgcgcgttattggccgaacgtttgcacgaaaatttattaggacgtttgcaaggcgaggagcgtctccgttggctttacgaagaagtggagaaaccattgagtcgcgtgctcgcgcatatggaagctaccggtgtcaaattagacgtggcgtatttggagaatctcagccttgaagttgctgcccacatgcgccgcttggaggaagaagtattccgtttagcaggccgttcctttcgccttaactctcgcgatcagttagaacgtgtgttgttcgatgaacttggtctccctcctatcggcaagacagagaagaccggtaaacgtagcacttcagcggcggttttagaagctcttcgcgaagtccatcccattgtggacaagatcttgcagtaccgcgaaatggcgaaattgaaaggcacctatattgaccgtcttccggcattagtccacccgaaaacgggacgcctccatacccgcttcaaccaaacagccacggcgaccggtcgtttgtcctcctctgatccaaaccttcagaatattccagtacgtacctttttgggccagaagatccgccgtgcgtttgtagctgaggagggttgggcgttagtggccctcgattatcgtcaaattgaattacgtgtccttgcccatctttctggcgatgagaacctcatccgcgtgtttcaggaaggcaaagacattcacactcaaacggcaagctggatgtttggattatcagctgaagcgatcgatcctttgatgcgtcgtgcagcgaagaccatcaatttcggtgttctctacggtatgagtgcctttcgtttgtcgcaggaattaggcattccctatgaagaagctcaggcgttcattcagaaatactttcaaagctatcccaaagttaaagcatggatcgagaagactctccgtgaaggccgcacacgtggttacgtagagaccttatttggacgtcgccgctatgttcccgatttaaacgctcgcgtgaaaggcaagcgtgaagccgccgaacgcatggcgttcaacatgcctgtacagggcacggcagctgacctcatgaaacttgcaatggtgcgcctttttccacaattgcgtgaagttggtgcccgcatgctgttgcaggtccacgatgaactcttgttagaagcgccaaaagagcgtgcggaagaggtggcagccctcgcgaaagaagttatggaaggcgtgtggcccttagcggtgcctcttgaagtcgaagttggtattggcgaggattggctggctgccaaagga

SEQ ID NO: 6618 - protein, 841 aa, synthetic construct
  REGION 1..841: note = Variant of DNA polymerase I from Thermus sp. strain 2.9
MHHHHHHGGSGVLPVFEPKGRVLLVDGHHLAYRNFFALKGLTTSLGEPVQGVYGFAKSLLKALKEDGDVVIVVFDAKAPSFRHEAYEAYKAGRAPTPEDFPRQLALMKELVDLLGLERLEVPGFEADDVLATLAKKAEREGYEVQILTADRDLFQLLSPRISVLHPEGHRITPEWLWEKYGLRPEQWVDFRALAGDPSDNIPGVKGIGEKTALKLLKEWGSLENLLKNLDQVKPESVREKILAHLEDLKLSRELSRVRTDLPLEVDFGRRREPDWEGLKAFLERLEFGSLLHEFGLLESPLLAEEAPWPPPEGAFLGYRLSRPEPMWAELLALAASAQGRVYRAEDPHGALRGLFEVRTLLAKDLAVVALREGLDLPPTDDPMLLAYLLDPSNTTPEGVARRYGGEWTEDAAKRALLAERLHENLLGRLQGEERLRWLYEEVEKPLSRVLAHMEATGVKLDVAYLENLSLEVAAHMRRLEEEVFRLAGRSFRLNSRDQLERVLFDELGLPPIGKTEKTGKRSTSAAVLEALREVHPIVDKILQYREMAKLKGTYIDRLPALVHPKTGRLHTRFNQTATATGRLSSSDPNLQNIPVRTFLGQKIRRAFVAEEGWALVALDYRQIELRVLAHLSGDENLIRVFQEGKDIHTQTASWMFGLSAEAIDPLMRRAAKTINFGVLYGMSAFRLSQELGIPYEEAQAFIQKYFQSYPKVKAWIEKTLREGRTRGYVETLFGRRRYVPDLNARVKGKREAAERMAFNMPVQGTAADLMKLAMVRLFPQLREVGARMLLQVHDELLLEAPKERAEEVAALAKEVMEGVWPLAVPLEVEVGIGEDWLAAKG

SEQ ID NO: 6619 - DNA, 2523 bp, synthetic construct
  misc_feature 1..2523: note = Variant of DNA polymerase I from Thermus sp. strain 2.9
  source 1..2523: mol_type = other DNA
atgcaccatcatcatcatcatggcggtagcggcgtgttaccggtgttcgagcctaaaggtcgcgtgcttctggttgatggccatcatctcgcgtatcgtaacttctttgccctgaaaggattaaccaccagcctgggcgagccggtacagggtgtctacggctttgcaaagtcgctcctgaaagctctgaaagaagacggtgatgtggtgattgttgtctttgatgcgaaagcgccaagttttcgccacgaagcgtacgaagcttacaaagccgggcgtgctccaacgccggaagactttcctcgccaattggcgcttatgaaggaattagtggatttgcttggcctcgaacgcttggaagttcccggtttcgaggcagacgacgtattagcgactctcgcaaagaaagccgaacgtgagggctatgaagtccagatcttgacagcagatcgcgatcttttccagcttttatctccgcgcatctcggtgttacacccggaagggcatcgtatcaccccggaatggctctgggagaaatatggtttgcgtcccgaacaatgggtggattttcgcgccttagcaggcgatccgagcgacaatattccgggagttaaaggtatcggcgagaagacggcgctcaagctccttaaagaatgggggtcgttggagaacttgcttaagaatttagatcaggtcaaaccagagtcagtgcgtgagaagattcttgctcacctcgaagacctcaaattaagccgcgaattgtcccgtgtacgcaccgatttgccgctcgaagttgatttcggtcgccgccgcgaacctgactgggagggtcttaaagcgtttttagagcgtcttgaatttggttcgctcttgcatgaattcggccttttagaaagcccgttactggccgaagaagcaccttggccaccgcccgagggcgcgtttttaggttaccgtttgagtcgcccggaaccgatgtgggccgaattactggctcttgcagcgtctgcccagggacgtgtgtatcgcgcggaagaccctcatggtgcgctccgcggcctcttcgaagtccgtaccctccttgccaaagacttagctgttgttgcattgcgcgaaggtcttgatttacctccgactgatgatccaatgcttcttgcgtacctcttggacccgtcaaacacgacgcccgaaggcgtagcccgtcgttacggcggcgagtggaccgaagatgcagcgaaacgcgcgttattggccgaacgtttgcacgaaaatttattaggacgtttgcaaggcgaggaacgtctcctctggctttacgaagaagtggagaaaccattgagtcgcgtgctcgcgcatatggaagctaccggtgtcaaattagacgtggcgtatttggagaatctcagccttgaagttgctgcccacatgcgccgcttggaggaagaagtattccgtttagcaggccgttcctttcgccttaactctcgcgatcagttagaacgtgtgttgttcgatgaacttggtctccctcctatcggcaagacagagaagaccggtaaacgtagcacttcagcggcggttttagaagctcttcgcgaagtccatcccattgtggacaagatcttgcagtaccgcgaaatggcgaaattgaaaggcacctatattgaccgtcttccggcattagtccacccgaaaacgggacgcctccatacccgcttcaaccaaacagccacggcgaccggtcgtttgtcctcctctgatccaaaccttcagaatattccagtacgtacctttttgggccagaagatccgccgtgcgtttgtagctgaggagggttgggcgttagtggccctcgattatcgtcaaattgaattacgtgtccttgcccatctttctggcgatgagaacctcatccgcgtgtttcaggaaggcaaagacattcacactcaaacggcaagctggatgtttggattatcagctgaagcgatcgatcctttgatgcgtcgtgcagcgaagaccatcaatttcggtgttctctacggtatgagtgcctttcgtttgtcgcaggaattaggcattcccctggaagaagctcaggctttcattcagaaatactttcaaagctatcccaaagttaaagcatggatcgagaagactctccgtgaaggccgcacacgtggttacgtagagaccttatttggacgtcgccgctatgttcccgatttaaacgctcgcgtgaaaggcaagcgtgaagccgccgaacgcatggcgttcaacatgcctgtacagggcacggcagctgacctcatgaaacttgcaatggtgcgcctttttccacaattgcgtgaagttggtgcccgcatgctgttgcaggtccacgatgaactcttgttagaagcgccaaaagagcgtgcggaagaggtggcagccctcgcgaaagaagttatggaaggcgtgtggcccttagcggtgcctcttgaagtcgaagttggtattggcgaggattggctggctgccaaagga

SEQ ID NO: 6620 - protein, 841 aa, synthetic construct
  REGION 1..841: note = Variant of DNA polymerase I from Thermus sp. strain 2.9
MHHHHHHGGSGVLPVFEPKGRVLLVDGHHLAYRNFFALKGLTTSLGEPVQGVYGFAKSLLKALKEDGDVVIVVFDAKAPSFRHEAYEAYKAGRAPTPEDFPRQLALMKELVDLLGLERLEVPGFEADDVLATLAKKAEREGYEVQILTADRDLFQLLSPRISVLHPEGHRITPEWLWEKYGLRPEQWVDFRALAGDPSDNIPGVKGIGEKTALKLLKEWGSLENLLKNLDQVKPESVREKILAHLEDLKLSRELSRVRTDLPLEVDFGRRREPDWEGLKAFLERLEFGSLLHEFGLLESPLLAEEAPWPPPEGAFLGYRLSRPEPMWAELLALAASAQGRVYRAEDPHGALRGLFEVRTLLAKDLAVVALREGLDLPPTDDPMLLAYLLDPSNTTPEGVARRYGGEWTEDAAKRALLAERLHENLLGRLQGEERLLWLYEEVEKPLSRVLAHMEATGVKLDVAYLENLSLEVAAHMRRLEEEVFRLAGRSFRLNSRDQLERVLFDELGLPPIGKTEKTGKRSTSAAVLEALREVHPIVDKILQYREMAKLKGTYIDRLPALVHPKTGRLHTRFNQTATATGRLSSSDPNLQNIPVRTFLGQKIRRAFVAEEGWALVALDYRQIELRVLAHLSGDENLIRVFQEGKDIHTQTASWMFGLSAEAIDPLMRRAAKTINFGVLYGMSAFRLSQELGIPLEEAQAFIQKYFQSYPKVKAWIEKTLREGRTRGYVETLFGRRRYVPDLNARVKGKREAAERMAFNMPVQGTAADLMKLAMVRLFPQLREVGARMLLQVHDELLLEAPKERAEEVAALAKEVMEGVWPLAVPLEVEVGIGEDWLAAKG

SEQ ID NO: 6621 - DNA, 2523 bp, synthetic construct
  misc_feature 1..2523: note = Variant of DNA polymerase I from Thermus sp. strain 2.9
  source 1..2523: mol_type = other DNA
atgcaccatcatcatcatcatggcggtagcggcgtgttaccggtgttcgagcctaaaggtcgcgtgcttctggttgatggccatcatctcgcgtatcgtaacttctttgccctgaaaggattaaccaccagcctgggcgagccggtacagggtgtctacggctttgcaaagtcgctcctgaaagctctgaaagaagacggtgatgtggtgattgttgtctttgatgcgaaagcgccaagttttcgccacgaagcgtacgaagcttacaaagccgggcgtgctccaacgccggaagactttcctcgccaattggcgcttatgaaggaattagtggatttgcttggcctcgaacgcttggaagttcccggtttcgaggcagacgacgtattagcgactctcgcaaagaaagccgaacgtgagggctatgaagtccagatcttgacagcagatcgcgatcttttccagcttttatctccgcgcatctcggtgttacacccggaagggcatcgtatcaccccggaatggctctgggagaaatatggtttgcgtcccgaacaatgggtggattttcgcgccttagcaggcgatccgagcgacaatattccgggagttaaaggtatcggcgagaagacggcgctcaagctccttaaagaatgggggtcgttggagaacttgcttaagaatttagatcaggtcaaaccagagtcagtgcgtgagaagattcttgctcacctcgaagacctcaaattaagccgcgaattgtcccgtgtacgcaccgatttgccgctcgaagttgatttcggtcgccgccgcgaacctgactgggagggtcttaaagcgtttttagagcgtcttgaatttggttcgctcttgcatgaattcggccttttagaaagcccgttactggccgaagaagcaccttggccaccgcccgagggcgcgtttttaggttaccgtttgagtcgcccggaaccgatgtgggccgaattactggctcttgcagcgtctgcccagggacgtgtgtatcgcgcggaagaccctcatggtgcgctccgcggcctcttcgaagtccgtggactccttgccaaagacttagctgttgttgcattgcgcgaaggtcttgatttacctccgactgatgatccaatgcttcttgcgtacctcttggacccgtcaaacacgacgcccgaaggcgtagcccgtcgttacggcggcgagtggaccgaagatgcagcgaaacgcgcgttattggccgaacgtttgcacgaaaatttattaggacgtttgcaaggcgaggagcgtctccgttggctttacgaagaagtggagaaaccattgagtcgcgtgctcgcgcatatggaagctaccggtgtcaaattagacgtggcgtatttggagaatctcagccttgaagttgctgcccacatgcgccgcttggaggaagaagtattccgtttagcaggccgttcctttcgccttaactctcgcgatcagttagaacgtgtgttgttcgatgaacttggtctccctcctatcggcaagacagagaagaccggtaaacgtagcacttcagcggcggttttagaagctcttcgcgaagtccatcccattgtggacaagatcttgcagtaccgcgaaatggcgaaattgaaaggcacctatattgaccgtcttccggcattagtccacccgaaaacgggacgcctccatacccgcttcaaccaaacagccacggcgaccggtcgtttgtcctcctctgatccaaaccttcagaatattccagtacgtaccccattgggccagaagatccgccgtgcgtttgtagctgaggagggttgggcgttagtggccctcgattatcgtcaaattgaattacgtgtccttgcccatctttctggcgatgagaacctcatccgcgtgtttcaggaaggcaaagacattcacactcaaacggcaagctggatgtttggattatcagctgaagcgatcgatcctttgatgcgtcgtgcagcgaagaccatcaatttcggtgttctctacggtatgagtgcctttcgtttgtcgcaggaattaggcattccctatgaagaagctcaggcgttcattcagaaatactttcaaagctatcccaaagttaaagcatggatcgagaagactctccgtgaaggccgcacacgtggttacgtagagaccttatttggacgtcgccgctatgttcccgatttaaactcgcgcgtgaaaggcaagcgtgaagccgccgaacgcatggcgttcaacatgcctgtacagggcacggcagctgacctcatgaaacttgcaatggtgcgcctttttccacaattgcgtgaagttggtgcccgcatgctgttgcaggtccacgatgaactcttgttagaagcgccaaaagagcgtgcggaagaggtggcagccctcgcgaaagaagttatggaaggcgtgtggcccttagcggtgcctcttgaagtcgaagttggtattggcgaggattggctggctgccaaagga

SEQ ID NO: 6622 - protein, 841 aa, synthetic construct
  REGION 1..841: note = Variant of DNA polymerase I from Thermus sp. strain 2.9
MHHHHHHGGSGVLPVFEPKGRVLLVDGHHLAYRNFFALKGLTTSLGEPVQGVYGFAKSLLKALKEDGDVVIVVFDAKAPSFRHEAYEAYKAGRAPTPEDFPRQLALMKELVDLLGLERLEVPGFEADDVLATLAKKAEREGYEVQILTADRDLFQLLSPRISVLHPEGHRITPEWLWEKYGLRPEQWVDFRALAGDPSDNIPGVKGIGEKTALKLLKEWGSLENLLKNLDQVKPESVREKILAHLEDLKLSRELSRVRTDLPLEVDFGRRREPDWEGLKAFLERLEFGSLLHEFGLLESPLLAEEAPWPPPEGAFLGYRLSRPEPMWAELLALAASAQGRVYRAEDPHGALRGLFEVRGLLAKDLAVVALREGLDLPPTDDPMLLAYLLDPSNTTPEGVARRYGGEWTEDAAKRALLAERLHENLLGRLQGEERLRWLYEEVEKPLSRVLAHMEATGVKLDVAYLENLSLEVAAHMRRLEEEVFRLAGRSFRLNSRDQLERVLFDELGLPPIGKTEKTGKRSTSAAVLEALREVHPIVDKILQYREMAKLKGTYIDRLPALVHPKTGRLHTRFNQTATATGRLSSSDPNLQNIPVRTPLGQKIRRAFVAEEGWALVALDYRQIELRVLAHLSGDENLIRVFQEGKDIHTQTASWMFGLSAEAIDPLMRRAAKTINFGVLYGMSAFRLSQELGIPYEEAQAFIQKYFQSYPKVKAWIEKTLREGRTRGYVETLFGRRRYVPDLNSRVKGKREAAERMAFNMPVQGTAADLMKLAMVRLFPQLREVGARMLLQVHDELLLEAPKERAEEVAALAKEVMEGVWPLAVPLEVEVGIGEDWLAAKG

SEQ ID NO: 6623 - DNA, 2523 bp, synthetic construct
  misc_feature 1..2523: note = Variant of DNA polymerase I from Thermus sp. strain 2.9
  source 1..2523: mol_type = other DNA
atgcaccatcatcatcatcatggcggtagcggcgtgttaccggtgttcgagcctaaaggtcgcgtgcttctggttgatggccatcatctcgcgtatcgtaacttctttgccctgaaaggattaaccaccagcctgggcgagccggtacagggtgtctacggctttgcaaagtcgctcctgaaagctctgaaagaagacggtgatgtggtgattgttgtctttgatgcgaaagcgccaagttttcgccacgaagcgtacgaagcttacaaagccgggcgtgctccaacgccggaagactttcctcgccaattggcgcttatgaaggaattagtggatttgcttggcctcgaacgcttggaagttcccggtttcgaggcagacgacgtattagcgactctcgcaaagaaagccgaacgtgagggctatgaagtccagatcttgacagcagatcgcgatcttttccagcttttatctccgcgcatctcggtgttacacccggaagggcatcgtatcaccccggaatggctctgggagaaatatggtttgcgtcccgaacaatgggtggattttcgcgccttagcaggcgatccgagcgacaatattccgggagttaaaggtatcggcgagaagacggcgctcaagctccttaaagaatgggggtcgttggagaacttgcttaagaatttagatcaggtcaaaccagagtcagtgcgtgagaagattcttgctcacctcgaagacctcaaattaagccgcgaattgtcccgtgtacgcaccgatttgccgctcgaagttgatttcggtcgccgccgcgaacctgactgggagggtcttaaagcgtttttagagcgtcttgaatttggttcgctcttgcatgaattcggccttttagaaagcccgttactggccgaagaagcaccttggccaccgcccgagggcgcgtttttaggttaccgtttgagtcgcccggaaccgatgtgggccgaattactggctcttgcagcgtctgcccagggacgtgtgtatcgcgcggaagaccctcatggtgcgctccgcggcctcttcgaagtccgtggcctccttgccaaagacttagctgttgttgcattgcgcgaaggtcttgatttacctccgactgatgatccaatgcttcttgcgtacctcttggacccgtcaaacacgacgcccgaaggcgtagcccgtcgttacggcggcgagtggaccgaagatgcaggcaaacgcgcgttattggccgaacgtttgcacgaaaatttattaggacgtttgcaaggcgaggagcgtctcctgtggctttacgaagaagtggagaaaccattgagtcgcgtgctcgcgcatatggaagctaccggtgtcaaattagacgtggcgtatttggagaatctcagccttgaagttgctgcccacatgcgccgcttggaggaagaagtattccgtttagcaggccgttcctttcgccttaactctcgcgatcagttagaacgtgtgttgttcgatgaacttggtctccctcctatcggcaagacagagaagaccggtaaacgtagcacttcagcggcggttttagaagctcttcgcgaagtccatcccattgtggacaagatcttgcagtaccgcgaaatggcgaaattgaaaggcacctatattgaccgtcttccggcattagtccacccgaaaacgggacgcctccatacccgcttcaaccaaacagccacggcgaccggtcgtttgtcctcctctgatccaaaccttcagaatattccagtacgtaccccattgggccagaagatccgccgtgcgtttgtagctgaggagggttgggcgttagtggccctcgattatcgtcaaattgaattacgtgtccttgcccatctttctggcgatgagaacctcatccgcgtgtttcaggaaggcaaagacattcacactcaaacggcaagctggatgtttggattatcagctgaagcgatcgatcctttgatgcgtcgtgcagcgaagaccatcaatttcggtgttctctacggtatgagtgcctttcgtttgtcgcaggaattaggcattccctatgaagaagctcagggtttcattcagaaatactttcaaagctatcccaaagttaaagcatggatcgagaagactctccgtgaaggccgcacacgtggttacgtagagaccttatttggacgtcgccgctatgttcccgatttaaactcgcgcgtgaaaggcaagcgtgaagccgccgaacgcatggcgttcaacatgcctgtacagggcacggcagctgacctcatgaaacttgcaatggtgcgcctttttccacaattgcgtgaagttggtgcccgcatgctgttgcaggtccacgatgaactcttgttagaagcgccaaaagagcgtgcggaagaggtggcagccctcgcgaaagaagttatggaaggcgtgtggcccttagcggtgcctcttgaagtcgaagttggtattggcgaggattggctggctgccaaagga

SEQ ID NO: 6624 - protein, 841 aa, synthetic construct
  REGION 1..841: note = Variant of DNA polymerase I from Thermus sp. strain 2.9
MHHHHHHGGSGVLPVFEPKGRVLLVDGHHLAYRNFFALKGLTTSLGEPVQGVYGFAKSLLKALKEDGDVVIVVFDAKAPSFRHEAYEAYKAGRAPTPEDFPRQLALMKELVDLLGLERLEVPGFEADDVLATLAKKAEREGYEVQILTADRDLFQLLSPRISVLHPEGHRITPEWLWEKYGLRPEQWVDFRALAGDPSDNIPGVKGIGEKTALKLLKEWGSLENLLKNLDQVKPESVREKILAHLEDLKLSRELSRVRTDLPLEVDFGRRREPDWEGLKAFLERLEFGSLLHEFGLLESPLLAEEAPWPPPEGAFLGYRLSRPEPMWAELLALAASAQGRVYRAEDPHGALRGLFEVRGLLAKDLAVVALREGLDLPPTDDPMLLAYLLDPSNTTPEGVARRYGGEWTEDAGKRALLAERLHENLLGRLQGEERLLWLYEEVEKPLSRVLAHMEATGVKLDVAYLENLSLEVAAHMRRLEEEVFRLAGRSFRLNSRDQLERVLFDELGLPPIGKTEKTGKRSTSAAVLEALREVHPIVDKILQYREMAKLKGTYIDRLPALVHPKTGRLHTRFNQTATATGRLSSSDPNLQNIPVRTPLGQKIRRAFVAEEGWALVALDYRQIELRVLAHLSGDENLIRVFQEGKDIHTQTASWMFGLSAEAIDPLMRRAAKTINFGVLYGMSAFRLSQELGIPYEEAQGFIQKYFQSYPKVKAWIEKTLREGRTRGYVETLFGRRRYVPDLNSRVKGKREAAERMAFNMPVQGTAADLMKLAMVRLFPQLREVGARMLLQVHDELLLEAPKERAEEVAALAKEVMEGVWPLAVPLEVEVGIGEDWLAAKG

SEQ ID NO: 6625 - DNA, 2523 bp, synthetic construct
  misc_feature 1..2523: note = Variant of DNA polymerase I from Thermus sp. strain 2.9
  source 1..2523: mol_type = other DNA
atgcaccatcatcatcatcatggcggtagcggcgtgttaccggtgttcgagcctaaaggtcgcgtgcttctggttgatggccatcatctcgcgtatcgtaacttctttgccctgaaaggattaaccaccagcctgggcgagccggtacagggtgtctacggctttgcaaagtcgctcctgaaagctctgaaagaagacggtgatgtggtgattgttgtctttgatgcgaaagcgccaagttttcgccacgaagcgtacgaagcttacaaagccgggcgtgctccaacgccggaagactttcctcgccaattggcgcttatgaaggaattagtggatttgcttggcctcgaacgcttggaagttcccggtttcgaggcagacgacgtattagcgactctcgcaaagaaagccgaacgtgagggctatgaagtccagatcttgacagcagatcgcgatcttttccagcttttatctccgcgcatctcggtgttacacccggaagggcatcgtatcaccccggaatggctctgggagaaatatggtttgcgtcccgaacaatgggtggattttcgcgccttagcaggcgatccgagcgacaatattccgggagttaaaggtatcggcgagaagacggcgctcaagctccttaaagaatgggggtcgttggagaacttgcttaagaatttagatcaggtcaaaccagagtcagtgcgtgagaagattcttgctcacctcgaagacctcaaattaagccgcgaattgtcccgtgtacgcaccgatttgccgctcgaagttgatttcggtcgccgccgcgaacctgactgggagggtcttaaagcgtttttagagcgtcttgaatttggttcgctcttgcatgaattcggccttttagaaagcccgttactggccgaagaagcaccttggccaccgcccgagggcgcgtttttaggttaccgtttgagtcgcccggaaccgatgtgggccgaattactggctcttgcagcgtctgcccagggacgtgtgtatcgcgcggaagaccctcatggtgcgctccgcggcctcttcgaagtccgtggcctccttgccaaagacttagctgttgttgcattgcgcgaaggtcttgatttacctccgactgatgatccaatgcttcttgcgtacctcttggacccgtcaaacacgacgcccgaaggcgtagcccgtcgttacggcggcgagtggtgggaagatgcagccaaacgcgcgttattggccgaacgtttgcacgaaaatttattaggacgtttgcaaggcgaggaacgtctcctctggctttacgaagaagtggagaaaccattgagtcgcgtgctcgcgcatatggaagctaccggtgtcaaattagacgtggcgtatttggagaatctcagccttgaagttgctgcccacatgcgccgcttggaggaagaagtattccgtttagcaggccgttcctttcgccttaactctcgcgatcagttagaacgtgtgttgttcgatgaacttggtctccctcctatcggcaagacagagaagaccggtaaacgtagcacttcagcggcggttttagaagctcttcgcgaagtccatcccattgtggacaagatcttgcagtaccgcgaaatggcgaaattgaaaggcacctatattgaccgtcttccggcattagtccacccgaaaacgggacgcctccatacccgcttcaaccaaacagccacggcgaccggtcgtttgtcctcctctgatccaaaccttcagaatattccagtacgtaccccattgggccagaagatccgccgtgcgtttgtagctgagccgggttgggcgttagtggccctcgattatcgtcaaattgaattacgtgtccttgcccatctttctggcgatgagaacctcatccgcgtgtttcaggaaggcaaagacattcacactcaaacggcaagctggatgtttggattatcagctgaagcgatcgatcctttgatgcgtcgtgcagcgaagaccatcaatttcggtgttctctacggtatgagtgcctttcgtttgtcgcaggaattaggcattccctatgaagaagctcaggctttcattcagaaatactttcaaagctatcccaaagttaaagcatggatcgagaagactctccgtgaaggccgcacacgtggttacgtagagaccttatttggacgtcgccgctatgttcccgatttaaacgctcgcgtgaaaggcaagcgtgaagccgccgaacgcatggcgttcaacatgcctgtacagggcacggcagctgacctcatgaaacttgcaatggtgcgcctttttccacaattgcgtgaagttggtgcccgcatgctgttgcaggtccacgatgaactcttgttagaagcgccaaaagagcgtgcggaagaggtggcagccctcgcgaaagaagttatggaaggcgtgtggcccttagcggtgcctcttgaagtcgaagttggtattggcgaggattggctggctgccaaagga

SEQ ID NO: 6626 - protein, 841 aa, synthetic construct
  REGION 1..841: note = Variant of DNA polymerase I from Thermus sp. strain 2.9
MHHHHHHGGSGVLPVFEPKGRVLLVDGHHLAYRNFFALKGLTTSLGEPVQGVYGFAKSLLKALKEDGDVVIVVFDAKAPSFRHEAYEAYKAGRAPTPEDFPRQLALMKELVDLLGLERLEVPGFEADDVLATLAKKAEREGYEVQILTADRDLFQLLSPRISVLHPEGHRITPEWLWEKYGLRPEQWVDFRALAGDPSDNIPGVKGIGEKTALKLLKEWGSLENLLKNLDQVKPESVREKILAHLEDLKLSRELSRVRTDLPLEVDFGRRREPDWEGLKAFLERLEFGSLLHEFGLLESPLLAEEAPWPPPEGAFLGYRLSRPEPMWAELLALAASAQGRVYRAEDPHGALRGLFEVRGLLAKDLAVVALREGLDLPPTDDPMLLAYLLDPSNTTPEGVARRYGGEWWEDAAKRALLAERLHENLLGRLQGEERLLWLYEEVEKPLSRVLAHMEATGVKLDVAYLENLSLEVAAHMRRLEEEVFRLAGRSFRLNSRDQLERVLFDELGLPPIGKTEKTGKRSTSAAVLEALREVHPIVDKILQYREMAKLKGTYIDRLPALVHPKTGRLHTRFNQTATATGRLSSSDPNLQNIPVRTPLGQKIRRAFVAEPGWALVALDYRQIELRVLAHLSGDENLIRVFQEGKDIHTQTASWMFGLSAEAIDPLMRRAAKTINFGVLYGMSAFRLSQELGIPYEEAQAFIQKYFQSYPKVKAWIEKTLREGRTRGYVETLFGRRRYVPDLNARVKGKREAAERMAFNMPVQGTAADLMKLAMVRLFPQLREVGARMLLQVHDELLLEAPKERAEEVAALAKEVMEGVWPLAVPLEVEVGIGEDWLAAKG

SEQ ID NO: 6627 - DNA, 2523 bp, synthetic construct
  misc_feature 1..2523: note = Variant of DNA polymerase I from Thermus sp. strain 2.9
  source 1..2523: mol_type = other DNA
atgcaccatcatcatcatcatggcggtagcggcgtgttaccggtgttcgagcctaaaggtcgcgtgcttctggttgatggccatcatctcgcgtatcgtaacttctttgccctgaaaggattaaccaccagcctgggcgagccggtacagggtgtctacggctttgcaaagtcgctcctgaaagctctgaaagaagacggtgatgtggtgattgttgtctttgatgcgaaagcgccaagttttcgccacgaagcgtacgaagcttacaaagccgggcgtgctccaacgccggaagactttcctcgccaattggcgcttatgaaggaattagtggatttgcttggcctcgaacgcttggaagttcccggtttcgaggcagacgacgtattagcgactctcgcaaagaaagccgaacgtgagggctatgaagtccagatcttgacagcagatcgcgatcttttccagcttttatctccgcgcatctcggtgttacacccggaagggcatcgtatcaccccggaatggctctgggagaaatatggtttgcgtcccgaacaatgggtggattttcgcgccttagcaggcgatccgagcgacaatattccgggagttaaaggtatcggcgagaagacggcgctcaagctccttaaagaatgggggtcgttggagaacttgcttaagaatttagatcaggtcaaaccagagtcagtgcgtgagaagattcttgctcacctcgaagacctcaaattaagccgcgaattgtcccgtgtacgcaccgatttgccgctcgaagttgatttcggtcgccgccgcgaacctgactgggagggtcttaaagcgtttttagagcgtcttgaatttggttcgctcttgcatgaattcggccttttagaaagcccgttactggccgaagaagcaccttggccaccgcccgagggcgcgtttttaggttaccgtttgagtcgcccggaaccgatgtgggccgaattactggctcttgcagcgtctgcccagggacgtgtgtatcgcgcggaagaccctcatggtgcgctccgcggcctcttcgaagtccgtggactccttgccaaagacttagctgttgttgcattgcgcgaaggtcttgatttacctccgactgatgatccaatgcttcttgcgtacctcttggacccgtcaaacacgacgcccgaaggcgtagcccgtcgttacggcggcgagtggaccgaagatgcagcgaaacgcgcgttattggccgaacgtttgcacgaaaatttattaggacgtttgcaaggcgaggaacgtctcctctggctttacgaagaagtggagaaaccattgagtcgcgtgctcgcgcatatggaagctaccggtgtcaaattagacgtggcgtatttggagaatctcagccttgaagttgctgcccacatgcgccgcttggaggaagaagtattccgtttagcaggccgttcctttcgccttaactctcgcgatcagttagaacgtgtgttgttcgatgaacttggtctccctcctatcggcaagacagagaagaccggtaaacgtagcacttcagcggcggttttagaagctcttcgcgaagtccatcccattgtggacaagatcttgcagtaccgcgaaatggcgaaattgaaaggcacctatattgaccgtcttccggcattagtccacccgaaaacgggacgcctccatacccgcttcaaccaaacagccacggcgaccggtcgtttgtcctcctctgatccaaaccttcagaatattccagtacgtaccccattgggccagaagatccgccgtgcgtttgtagctgagccgggttgggcgttagtggccctcgattatcgtcaaattgaattacgtgtccttgcccatctttctggcgatgagaacctcatccgcgtgtttcaggaaggcaaagacattcacactcaaacggcaagctggatgtttggattatcagctgaagcgatcgatcctttgatgcgtcgtgcagcgaagaccatcaatttcggtgttctctacggtatgagtgcctttcgtttgtcgcaggaattaggcattccctatgaagaagctcaggcgttcattcagaaatactttcaaagctatcccaaagttaaagcatggatcgagaagactctccgtgaaggccgcacacgtggttacgtagagaccttatttggacgtcgccgctatgttcccgatttaaacgctcgcgtgaaaggcaagcgtgaagccgccgaacgcatggcgttcaacatgcctgtacagggcacggcagctgacctcatgaaacttgcaatggtgcgcctttttccacaattgcgtgaagttggtgcccgcatgctgttgcaggtccacgatgaactcttgttagaagcgccaaaagagcgtgcggaagaggtggcagccctcgcgaaagaagttatggaaggcgtgtggcccttagcggtgcctcttgaagtcgaagttggtattggcgaggattggctggctgccaaagga

SEQ ID NO: 6628 - protein, 841 aa, synthetic construct; identical to SEQ ID NO: 6022
  REGION 1..841: note = Variant of DNA polymerase I from Thermus sp. strain 2.9

SEQ ID NO: 6629 - DNA, 2523 bp, synthetic construct
  misc_feature 1..2523: note = Variant of DNA polymerase I from Thermus sp. strain 2.9
  source 1..2523: mol_type = other DNA
atgcaccatcatcatcatcatggcggtagcggcgtgttaccggtgttcgagcctaaaggtcgcgtgcttctggttgatggccatcatctcgcgtatcgtaacttctttgccctgaaaggattaaccaccagcctgggcgagccggtacagggtgtctacggctttgcaaagtcgctcctgaaagctctgaaagaagacggtgatgtggtgattgttgtctttgatgcgaaagcgccaagttttcgccacgaagcgtacgaagcttacaaagccgggcgtgctccaacgccggaagactttcctcgccaattggcgcttatgaaggaattagtggatttgcttggcctcgaacgcttggaagttcccggtttcgaggcagacgacgtattagcgactctcgcaaagaaagccgaacgtgagggctatgaagtccagatcttgacagcagatcgcgatcttttccagcttttatctccgcgcatctcggtgttacacccggaagggcatcgtatcaccccggaatggctctgggagaaatatggtttgcgtcccgaacaatgggtggattttcgcgccttagcaggcgatccgagcgacaatattccgggagttaaaggtatcggcgagaagacggcgctcaagctccttaaagaatgggggtcgttggagaacttgcttaagaatttagatcaggtcaaaccagagtcagtgcgtgagaagattcttgctcacctcgaagacctcaaattaagccgcgaattgtcccgtgtacgcaccgatttgccgctcgaagttgatttcggtcgccgccgcgaacctgactgggagggtcttaaagcgtttttagagcgtcttgaatttggttcgctcttgcatgaattcggccttttagaaagcccgttactggccgaagaagcaccttggccaccgcccgagggcgcgtttttaggttaccgtttgagtcgcccggaaccgatgtgggccgaattactggctcttgcagcgtctgcccagggacgtgtgtatcgcgcggaagaccctcatggtgcgctccgcggcctcttcgaagtccgtggactccttgccaaagacttagctgttgttgcattgcgcgaaggtcttgatttacctccgactgatgatccaatgcttcttgcgtacctcttggacccgtcaaacacgacgcccgaaggcgtagcccgtcgttacggcggcgagtggaccgaagatgcagccaaacgcgcgttattggccgaacgtttgcacgaaaatttattaggacgtttgcaaggcgaggcgcgtctccgttggctttacgaagaagtggagaaaccattgagtcgcgtgctcgcgcatatggaagctaccggtgtcaaattagacgtggcgtatttggagaatctcagccttgaagttgctgcccacatgcgccgcttggaggaagaagtattccgtttagcaggccgttcctttcgccttaactctcgcgatcagttagaacgtgtgttgttcgatgaacttggtctccctcctatcggcaagacagagaagaccggtaaacgtagcacttcagcggcggttttagaagctcttcgcgaagtccatcccattgtggacaagatcttgcagtaccgcgaaatggcgaaattgaaaggcacctatattgaccgtcttccggcattagtccacccgaaaacgggacgcctccatacccgcttcaaccaaacagccacggcgaccggtcgtttgtcctcctctgatccaaaccttcagaatattccagtacgtaccccattgggccagaagatccgccgtgcgtttgtagctgaggagggttgggcgttagtggccctcgattatcgtcaaattgaattacgtgtccttgcccatctttctggcgatgagaacctcatccgcgtgtttcaggaaggcaaagacattcacactcaaacggcaagctggatgtttggattatcagctgaagcgatcgatcctttgatgcgtcgtgcagcgaagaccatcaatttcggtgttctctacggtatgagtgcctttcgtttgtcgcaggaattaggcattccctatgaagaagctcaggctttcattcagaaatactttcaaagctatcccaaagttaaagcatggatcgagaagactctccgtgaaggccgcacacgtggttacgtagagaccttatttggacgtcgccgctatgttcccgatttaaacggtcgcgtgaaaggcaagcgtgaagccgccgaacgcatggcgttcaacatgcctgtacagggcacggcagctgacctcatgaaacttgcaatggtgcgcctttttccacaattgcgtgaagttggtgcccgcatgctgttgcaggtccacgatgaactcttgttagaagcgccaaaagagcgtgcggaagaggtggcagccctcgcgaaagaagttatggaaggcgtgtggcccttagcggtgcctcttgaagtcgaagttggtattggcgaggattggctggctgccaaagga

SEQ ID NO: 6630 - protein, 841 aa, synthetic construct
  REGION 1..841: note = Variant of DNA polymerase I from Thermus sp. strain 2.9
MHHHHHHGGSGVLPVFEPKGRVLLVDGHHLAYRNFFALKGLTTSLGEPVQGVYGFAKSLLKALKEDGDVVIVVFDAKAPSFRHEAYEAYKAGRAPTPEDFPRQLALMKELVDLLGLERLEVPGFEADDVLATLAKKAEREGYEVQILTADRDLFQLLSPRISVLHPEGHRITPEWLWEKYGLRPEQWVDFRALAGDPSDNIPGVKGIGEKTALKLLKEWGSLENLLKNLDQVKPESVREKILAHLEDLKLSRELSRVRTDLPLEVDFGRRREPDWEGLKAFLERLEFGSLLHEFGLLESPLLAEEAPWPPPEGAFLGYRLSRPEPMWAELLALAASAQGRVYRAEDPHGALRGLFEVRGLLAKDLAVVALREGLDLPPTDDPMLLAYLLDPSNTTPEGVARRYGGEWTEDAAKRALLAERLHENLLGRLQGEARLRWLYEEVEKPLSRVLAHMEATGVKLDVAYLENLSLEVAAHMRRLEEEVFRLAGRSFRLNSRDQLERVLFDELGLPPIGKTEKTGKRSTSAAVLEALREVHPIVDKILQYREMAKLKGTYIDRLPALVHPKTGRLHTRFNQTATATGRLSSSDPNLQNIPVRTPLGQKIRRAFVAEEGWALVALDYRQIELRVLAHLSGDENLIRVFQEGKDIHTQTASWMFGLSAEAIDPLMRRAAKTINFGVLYGMSAFRLSQELGIPYEEAQAFIQKYFQSYPKVKAWIEKTLREGRTRGYVETLFGRRRYVPDLNGRVKGKREAAERMAFNMPVQGTAADLMKLAMVRLFPQLREVGARMLLQVHDELLLEAPKERAEEVAALAKEVMEGVWPLAVPLEVEVGIGEDWLAAKG

SEQ ID NO: 6631 - DNA, 2523 bp, synthetic construct
  misc_feature 1..2523: note = Variant of DNA polymerase I from Thermus sp. strain 2.9
  source 1..2523: mol_type = other DNA
atgcaccatcatcatcatcatggcggtagcggcgtgttaccggtgttcgagcctaaaggtcgcgtgcttctggttgatggccatcatctcgcgtatcgtaacttctttgccctgaaaggattaaccaccagcctgggcgagccggtacagggtgtctacggctttgcaaagtcgctcctgaaagctctgaaagaagacggtgatgtggtgattgttgtctttgatgcgaaagcgccaagttttcgccacgaagcgtacgaagcttacaaagccgggcgtgctccaacgccggaagactttcctcgccaattggcgcttatgaaggaattagtggatttgcttggcctcgaacgcttggaagttcccggtttcgaggcagacgacgtattagcgactctcgcaaagaaagccgaacgtgagggctatgaagtccagatcttgacagcagatcgcgatcttttccagcttttatctccgcgcatctcggtgttacacccggaagggcatcgtatcaccccggaatggctctgggagaaatatggtttgcgtcccgaacaatgggtggattttcgcgccttagcaggcgatccgagcgacaatattccgggagttaaaggtatcggcgagaagacggcgctcaagctccttaaagaatgggggtcgttggagaacttgcttaagaatttagatcaggtcaaaccagagtcagtgcgtgagaagattcttgctcacctcgaagacctcaaattaagccgcgaattgtcccgtgtacgcaccgatttgccgctcgaagttgatttcggtcgccgccgcgaacctgactgggagggtcttaaagcgtttttagagcgtcttgaatttggttcgctcttgcatgaattcggccttttagaaagcccgttactggccgaagaagcaccttggccaccgcccgagggcgcgtttttaggttaccgtttgagtcgcccggaaccgatgtgggccgaattactggctcttgcagcgtctgcccagggacgtgtgtatcgcgcggaagaccctcatggtgcgctccgcggcctcttcgaagtccgtaccctccttgccaaagacttagctgttgttgcattgcgcgaaggtcttgatttacctccgactgatgatccaatgcttcttgcgtacctcttggacccgtcaaacacgacgcccgaaggcgtagcccgtcgttacggcggcgagtggaccgaagatgcaggcaaacgcgcgttattggccgaacgtttgcacgaaaatttattaggacgtttgcaaggcgaggagcgtctccgttggctttacgaagaagtggagaaaccattgagtcgcgtgctcgcgcatatggaagctaccggtgtcaaattagacgtggcgtatttggagaatctcagccttgaagttgctgcccacatgcgccgcttggaggaagaagtattccgtttagcaggccgttcctttcgccttaactctcgcgatcagttagaacgtgtgttgttcgatgaacttggtctccctcctatcggcaagacagagaagaccggtaaacgtagcacttcagcggcggttttagaagctcttcgcgaagtccatcccattgtggacaagatcttgcagtaccgcgaaatggcgaaattgaaaggcacctatattgaccgtcttccggcattagtccacccgaaaacgggacgcctccatacccgcttcaaccaaacagccacggcgaccggtcgtttgtcctcctctgatccaaaccttcagaatattccagtacgtacctttttgggccagaagatccgccgtgcgtttgtagctgagaagggttggcgtttagtggccctcgattatcgtcaaattgaattacgtgtccttgcccatctttctggcgatgagaacctcatccgcgtgtttcaggaaggcaaagacattcacactcaaacggcaagctggatgtttggattatcagctgaagcgatcgatcctttgatgcgtcgtgcagcgaagaccatcaatttcggtgttctctacggtatgagtgcctttcgtttgtcgcaggaattaggcattcccctggaagaagctcagggtttcattcagaaatactttcaaggctatcccaaagttaaagcatggatcgagaagactctccgtgaaggccgcacacgtggttacgtagagaccttatttggacgtcgccgctatgttcccgatttaaactcgcgcgtgaaaggcaagcgtgaagccgccgaacgcatggcgttcaacatgcctgtacagggcacggcagctgacctcatgaaacttgcaatggtgcgcctttttccacaattgcgtgaagttggtgcccgcatgctcttgcaggtccacgatgaactcttgttagaagcgccaaaagagcgtgcggaagaggtggcagccctcgcgaaagaagttatggaaggcgtgtggcccttagcggtgcctcttgaagtcgaagttggtattggcgaggattggctggctgccaaagga

SEQ ID NO: 6632 - protein, 841 aa, synthetic construct
  REGION 1..841: note = Variant of DNA polymerase I from Thermus sp. strain 2.9
MHHHHHHGGSGVLPVFEPKGRVLLVDGHHLAYRNFFALKGLTTSLGEPVQGVYGFAKSLLKALKEDGDVVIVVFDAKAPSFRHEAYEAYKAGRAPTPEDFPRQLALMKELVDLLGLERLEVPGFEADDVLATLAKKAEREGYEVQILTADRDLFQLLSPRISVLHPEGHRITPEWLWEKYGLRPEQWVDFRALAGDPSDNIPGVKGIGEKTALKLLKEWGSLENLLKNLDQVKPESVREKILAHLEDLKLSRELSRVRTDLPLEVDFGRRREPDWEGLKAFLERLEFGSLLHEFGLLESPLLAEEAPWPPPEGAFLGYRLSRPEPMWAELLALAASAQGRVYRAEDPHGALRGLFEVRTLLAKDLAVVALREGLDLPPTDDPMLLAYLLDPSNTTPEGVARRYGGEWTEDAGKRALLAERLHENLLGRLQGEERLRWLYEEVEKPLSRVLAHMEATGVKLDVAYLENLSLEVAAHMRRLEEEVFRLAGRSFRLNSRDQLERVLFDELGLPPIGKTEKTGKRSTSAAVLEALREVHPIVDKILQYREMAKLKGTYIDRLPALVHPKTGRLHTRFNQTATATGRLSSSDPNLQNIPVRTFLGQKIRRAFVAEKGWRLVALDYRQIELRVLAHLSGDENLIRVFQEGKDIHTQTASWMFGLSAEAIDPLMRRAAKTINFGVLYGMSAFRLSQELGIPLEEAQGFIQKYFQGYPKVKAWIEKTLREGRTRGYVETLFGRRRYVPDLNSRVKGKREAAERMAFNMPVQGTAADLMKLAMVRLFPQLREVGARMLLQVHDELLLEAPKERAEEVAALAKEVMEGVWPLAVPLEVEVGIGEDWLAAKG

SEQ ID NO: 6633 - DNA, 2523 bp, synthetic construct
  misc_feature 1..2523: note = Variant of DNA polymerase I from Thermus sp. strain 2.9
  source 1..2523: mol_type = other DNA
atgcaccatcatcatcatcatggcggtagcggcgtgttaccggtgttcgagcctaaaggtcgcgtgcttctggttgatggccatcatctcgcgtatcgtaacttctttgccctgaaaggattaaccaccagcctgggcgagccggtacagggtgtctacggctttgcaaagtcgctcctgaaagctctgaaagaagacggtgatgtggtgattgttgtctttgatgcgaaagcgccaagttttcgccacgaagcgtacgaagcttacaaagccgggcgtgctccaacgccggaagactttcctcgccaattggcgcttatgaaggaattagtggatttgcttggcctcgaacgcttggaagttcccggtttcgaggcagacgacgtattagcgactctcgcaaagaaagccgaacgtgagggctatgaagtccagatcttgacagcagatcgcgatcttttccagcttttatctccgcgcatctcggtgttacacccggaagggcatcgtatcaccccggaatggctctgggagaaatatggtttgcgtcccgaacaatgggtggattttcgcgccttagcaggcgatccgagcgacaatattccgggagttaaaggtatcggcgagaagacggcgctcaagctccttaaagaatgggggtcgttggagaacttgcttaagaatttagatcaggtcaaaccagagtcagtgcgtgagaagattcttgctcacctcgaagacctcaaattaagccgcgaattgtcccgtgtacgcaccgatttgccgctcgaagttgatttcggtcgccgccgcgaacctgactgggagggtcttaaagcgtttttagagcgtcttgaatttggttcgctcttgcatgaattcggccttttagaaagcccgttactggccgaagaagcaccttggccaccgcccgagggcgcgtttttaggttaccgtttgagtcgcccggaaccgatgtgggccgaattactggctcttgcagcgtctgcccagggacgtgtgtatcgcgcggaagaccctcatggtgcgctccgcggcctcttcgaagtccgtaccctccttgccaaagacttagctgttgttgcattgcgcgaaggtcttgatttacctccgactgatgatccaatgcttcttgcgtacctcttggacccgtcaaacacgacgcccgaaggcgtagcccgtcgttacggcggcgagtggaccgaagatgcagccaaacgcgcgttattggccgaacgtttgcacgaaaatttattaggacgtttgcaaggcgaggaacgtctcctctggctttacgaagaagtggagaaaccattgagtcgcgtgctcgcgcatatggaagctaccggtgtcaaattagacgtggcgtatttggagaatctcagccttgaagttgctgcccacatgcgccgcttggaggaagaagtattccgtttagcaggccgttcctttcgccttaactctcgcgatcagttagaacgtgtgttgttcgatgaacttggtctccctcctatcggcaagacagagaagaccggtaaacgtagcacttcagcggcggttttagaagctcttcgcgaagtccatcccattgtggacaagatcttgcagtaccgcgaaatggcgaaattgaaaggcacctatattgaccgtcttccggcattagtccacccgaaaacgggacgcctccatacccgcttcaaccaaacagccacggcgaccggtcgtttgtcctcctctgatccaaaccttcagaatattccagtacgtaccccattgggccagaagatccgccgtgcgtttgtagctgaggagggttgggcgttagtggccctcgattatcgtcaaattgaattacgtgtccttgcccatctttctggcgatgagaacctcatccgcgtgtttcaggaaggcaaagacattcacactcaaacggcaagctggatgtttggattatcagctgaagcgatcgatcctttgatgcgtcgtgcagcgaagaccatcaatttcggtgttctctacggtatgagtgcctttcgtttgtcgcaggaattaggcattccctatgaagaagctcaggcgttcattcagaaatactttcaaagctatcccaaagttaaagcatggatcgagaagactctccgtgaaggccgcacacgtggttacgtagagaccttatttggacgtcgccgctatgttcccgatttaaacgctcgcgtgaaaggcaagcgtgaagccgccgaacgcatggcgttcaacatgcctgtacagggcacggcagctgacctcatgaaacttgcaatggtgcgcctttttccacaattgcgtgaagttggtgcccgcatggatttgcaggtccacgatgaactcttgttagaagcgccaaaagagcgtgcggaagaggtggcagccctcgcgaaagaagttatggaaggcgtgtggcccttagcggtgcctcttgaagtcgaagttggtattggcgaggattggctggctgccaaagga

SEQ ID NO: 6634 - protein, 841 aa, synthetic construct
  REGION 1..841: note = Variant of DNA polymerase I from Thermus sp. strain 2.9
MHHHHHHGGSGVLPVFEPKGRVLLVDGHHLAYRNFFALKGLTTSLGEPVQGVYGFAKSLLKALKEDGDVVIVVFDAKAPSFRHEAYEAYKAGRAPTPEDFPRQLALMKELVDLLGLERLEVPGFEADDVLATLAKKAEREGYEVQILTADRDLFQLLSPRISVLHPEGHRITPEWLWEKYGLRPEQWVDFRALAGDPSDNIPGVKGIGEKTALKLLKEWGSLENLLKNLDQVKPESVREKILAHLEDLKLSRELSRVRTDLPLEVDFGRRREPDWEGLKAFLERLEFGSLLHEFGLLESPLLAEEAPWPPPEGAFLGYRLSRPEPMWAELLALAASAQGRVYRAEDPHGALRGLFEVRTLLAKDLAVVALREGLDLPPTDDPMLLAYLLDPSNTTPEGVARRYGGEWTEDAAKRALLAERLHENLLGRLQGEERLLWLYEEVEKPLSRVLAHMEATGVKLDVAYLENLSLEVAAHMRRLEEEVFRLAGRSFRLNSRDQLERVLFDELGLPPIGKTEKTGKRSTSAAVLEALREVHPIVDKILQYREMAKLKGTYIDRLPALVHPKTGRLHTRFNQTATATGRLSSSDPNLQNIPVRTPLGQKIRRAFVAEEGWALVALDYRQIELRVLAHLSGDENLIRVFQEGKDIHTQTASWMFGLSAEAIDPLMRRAAKTINFGVLYGMSAFRLSQELGIPYEEAQAFIQKYFQSYPKVKAWIEKTLREGRTRGYVETLFGRRRYVPDLNARVKGKREAAERMAFNMPVQGTAADLMKLAMVRLFPQLREVGARMDLQVHDELLLEAPKERAEEVAALAKEVMEGVWPLAVPLEVEVGIGEDWLAAKG

SEQ ID NO: 6635 - DNA, 2523 bp, synthetic construct
  misc_feature 1..2523: note = Variant of DNA polymerase I from Thermus sp. strain 2.9
  source 1..2523: mol_type = other DNA
atgcaccatcatcatcatcatggcggtagcggcgtgttaccggtgttcgagcctaaaggtcgcgtgcttctggttgatggccatcatctcgcgtatcgtaacttctttgccctgaaaggattaaccaccagcctgggcgagccggtacagggtgtctacggctttgcaaagtcgctcctgaaagctctgaaagaagacggtgatgtggtgattgttgtctttgatgcgaaagcgccaagttttcgccacgaagcgtacgaagcttacaaagccgggcgtgctccaacgccggaagactttcctcgccaattggcgcttatgaaggaattagtggatttgcttggcctcgaacgcttggaagttcccggtttcgaggcagacgacgtattagcgactctcgcaaagaaagccgaacgtgagggctatgaagtccagatcttgacagcagatcgcgatcttttccagcttttatctccgcgcatctcggtgttacacccggaagggcatcgtatcaccccggaatggctctgggagaaatatggtttgcgtcccgaacaatgggtggattttcgcgccttagcaggcgatccgagcgacaatattccgggagttaaaggtatcggcgagaagacggcgctcaagctccttaaagaatgggggtcgttggagaacttgcttaagaatttagatcaggtcaaaccagagtcagtgcgtgagaagattcttgctcacctcgaagacctcaaattaagccgcgaattgtcccgtgtacgcaccgatttgccgctcgaagttgatttcggtcgccgccgcgaacctgactgggagggtcttaaagcgtttttagagcgtcttgaatttggttcgctcttgcatgaattcggccttttagaaagcccgttactggccgaagaagcaccttggccaccgcccgagggcgcgtttttaggttaccgtttgagtcgcccggaaccgatgtgggccgaattactggctcttgcagcgtctgcccagggacgtgtgtatcgcgcggaagaccctcatggtgcgctccgcggcctcttcgaagtccgtggactccttgccaaagacttagctgttgttgcattgcgcgaaggtcttgatttacctccgactgatgatccaatgcttcttgcgtacctcttggacccgtcaaacacgacgcccgaaggcgtagcccgtcgttacggcggcgagtggaccgaagatgcagccaaacgcgcgttattggccgaacgtttgcacgaaaatttattaggacgtttgcaaggcgaggagcgtctcctgtggctttacgaagaagtggagaaaccattgagtcgcgtgctcgcgcatatggaagctaccggtgtcaaattagacgtggcgtatttggagaatctcagccttgaagttgctgcccacatgcgccgcttggaggaagaagtattccgtttagcaggccgttcctttcgccttaactctcgcgatcagttagaacgtgtgttgttcgatgaacttggtctccctcctatcggcaagacagagaagaccggtaaacgtagcacttcagcggcggttttagaagctcttcgcgaagtccatcccattgtggacaagatcttgcagtaccgcgaaatggcgaaattgaaaggcacctatattgaccgtcttccggcattagtccacccgaaaacgggacgcctccatacccgcttcaaccaaacagccacggcgaccggtcgtttgtcctcctctgatccaaaccttcagaatattccagtacgtacctttttgggccagaagatccgccgtgcgtttgtagctgagccgggttggcgtttagtggccctcgattatcgtcaaattgaattacgtgtccttgcccatctttctggcgatgagaacctcatccgcgtgtttcaggaaggcaaagacattcacactcaaacggcaagctggatgtttggattatcagctgaagcgatcgatcctttgatgcgtcgtgcagcgaagaccatcaatttcggtgttctctacggtatgagtgcctttcgtttgtcgcaggaattaggcattccctatgaagaagctcaggctttcattcagaaatactttcaaggctatcccaaagttaaagcatggatcgagaagactctccgtgaaggccgcacacgtggttacgtagagaccttatttggacgtcgccgctatgttcccgatttaaacggtcgcgtgaaaggcaagcgtgaagccgccgaacgcatggcgttcaacatgcctgtacagggcacggcagctgacctcatgaaacttgcaatggtgcgcctttttccacaattgcgtgaagttggtgcccgcatgctgttgcaggtccacgatgaactcttgttagaagcgccaaaagagcgtgcggaagaggtggcagccctcgcgaaagaagttatggaaggcgtgtggcccttagcggtgcctcttgaagtcgaagttggtattggcgaggattggctggctgccaaagga

SEQ ID NO: 6636 - protein, 841 aa, synthetic construct
  REGION 1..841: note = Variant of DNA polymerase I from Thermus sp. strain 2.9
MHHHHHHGGSGVLPVFEPKGRVLLVDGHHLAYRNFFALKGLTTSLGEPVQGVYGFAKSLLKALKEDGDVVIVVFDAKAPSFRHEAYEAYKAGRAPTPEDFPRQLALMKELVDLLGLERLEVPGFEADDVLATLAKKAEREGYEVQILTADRDLFQLLSPRISVLHPEGHRITPEWLWEKYGLRPEQWVDFRALAGDPSDNIPGVKGIGEKTALKLLKEWGSLENLLKNLDQVKPESVREKILAHLEDLKLSRELSRVRTDLPLEVDFGRRREPDWEGLKAFLERLEFGSLLHEFGLLESPLLAEEAPWPPPEGAFLGYRLSRPEPMWAELLALAASAQGRVYRAEDPHGALRGLFEVRGLLAKDLAVVALREGLDLPPTDDPMLLAYLLDPSNTTPEGVARRYGGEWTEDAAKRALLAERLHENLLGRLQGEERLLWLYEEVEKPLSRVLAHMEATGVKLDVAYLENLSLEVAAHMRRLEEEVFRLAGRSFRLNSRDQLERVLFDELGLPPIGKTEKTGKRSTSAAVLEALREVHPIVDKILQYREMAKLKGTYIDRLPALVHPKTGRLHTRFNQTATATGRLSSSDPNLQNIPVRTFLGQKIRRAFVAEPGWRLVALDYRQIELRVLAHLSGDENLIRVFQEGKDIHTQTASWMFGLSAEAIDPLMRRAAKTINFGVLYGMSAFRLSQELGIPYEEAQAFIQKYFQGYPKVKAWIEKTLREGRTRGYVETLFGRRRYVPDLNGRVKGKREAAERMAFNMPVQGTAADLMKLAMVRLFPQLREVGARMLLQVHDELLLEAPKERAEEVAALAKEVMEGVWPLAVPLEVEVGIGEDWLAAKG

SEQ ID NO: 6637 - DNA, 2523 bp, synthetic construct
  misc_feature 1..2523: note = Variant of DNA polymerase I from Thermus sp. strain 2.9
  source 1..2523: mol_type = other DNA
atgcaccatcatcatcatcatggcggtagcggcgtgttaccggtgttcgagcctaaaggtcgcgtgcttctggttgatggccatcatctcgcgtatcgtaacttctttgccctgaaaggattaaccaccagcctgggcgagccggtacagggtgtctacggctttgcaaagtcgctcctgaaagctctgaaagaagacggtgatgtggtgattgttgtctttgatgcgaaagcgccaagttttcgccacgaagcgtacgaagcttacaaagccgggcgtgctccaacgccggaagactttcctcgccaattggcgcttatgaaggaattagtggatttgcttggcctcgaacgcttggaagttcccggtttcgaggcagacgacgtattagcgactctcgcaaagaaagccgaacgtgagggctatgaagtccagatcttgacagcagatcgcgatcttttccagcttttatctccgcgcatctcggtgttacacccggaagggcatcgtatcaccccggaatggctctgggagaaatatggtttgcgtcccgaacaatgggtggattttcgcgccttagcaggcgatccgagcgacaatattccgggagttaaaggtatcggcgagaagacggcgctcaagctccttaaagaatgggggtcgttggagaacttgcttaagaatttagatcaggtcaaaccagagtcagtgcgtgagaagattcttgctcacctcgaagacctcaaattaagccgcgaattgtcccgtgtacgcaccgatttgccgctcgaagttgatttcggtcgccgccgcgaacctgactgggagggtcttaaagcgtttttagagcgtcttgaatttggttcgctcttgcatgaattcggccttttagaaagcccgttactggccgaagaagcaccttggccaccgcccgagggcgcgtttttaggttaccgtttgagtcgcccggaaccgatgtgggccgaattactggctcttgcagcgtctgcccagggacgtgtgtatcgcgcggaagaccctcatggtgcgctccgcggcctcttcgaagtccgtggcctccttgccaaagacttagctgttgttgcattgcgcgaaggtcttgatttacctccgactgatgatccaatgcttcttgcgtacctcttggacccgtcaaacacgacgcccgaaggcgtagcccgtcgttacggcggcgagtggaccgaagatgcagccaaacgcgcgttattggccgaacgtttgcacgaaaatttattaggacgtttgcaaggcgaggagcgtctccgttggctttacgaagaagtggagaaaccattgagtcgcgtgctcgcgcatatggaagctaccggtgtcaaattagacgtggcgtatttggagaatctcagccttgaagttgctgcccacatgcgccgcttggaggaagaagtattccgtttagcaggccgttcctttcgccttaactctcgcgatcagttagaacgtgtgttgttcgatgaacttggtctccctcctatcggcaagacagagaagaccggtaaacgtagcacttcagcggcggttttagaagctcttcgcgaagtccatcccattgtggacaagatcttgcagtaccgcgaaatggcgaaattgaaaggcacctatattgaccgtcttccggcattagtccacccgaaaacgggacgcctccatacccgcttcaaccaaacagccacggcgaccggtcgtttgtcctcctctgatccaaaccttcagaatattccagtacgtaccccattgggccagaagatccgccgtgcgtttgtagctgagccgggttgggcgttagtggccctcgattatcgtcaaattgaattacgtgtccttgcccatctttctggcgatgagaacctcatccgcgtgtttcaggaaggcaaagacattcacactcaaacggcaagctggatgtttggattatcagctgaagcgatcgatcctttgatgcgtcgtgcagcgaagaccatcaatttcggtgttctctacggtatgagtgcctttcgtttgtcgcaggaattaggcattccctatgaagaagctcaggctttcattcagaaatactttcaaggctatcccaaagttaaagcatggatcgagaagactctccgtgaaggccgcacacgtggttacgtagagaccttatttggacgtcgccgctatgttcccgatttaaacgctcgcgtgaaaggcaagcgtgaagccgccgaacgcatggcgttcaacatgcctgtacagggcacggcagctgacctcatgaaacttgcaatggtgcgcctttttccacaattgcgtgaagttggtgcccgcatgctgttgcaggtccacgatgaactcttgttagaagcgccaaaagagcgtgcggaagaggtggcagccctcgcgaaagaagttatggaaggcgtgtggcccttagcggtgcctcttgaagtcgaagttggtattggcgaggattggctggctgccaaagga

SEQ ID NO: 6638 - protein, 841 aa, synthetic construct
  REGION 1..841: note = Variant of DNA polymerase I from Thermus sp. strain 2.9
MHHHHHHGGSGVLPVFEPKGRVLLVDGHHLAYRNFFALKGLTTSLGEPVQGVYGFAKSLLKALKEDGDVVIVVFDAKAPSFRHEAYEAYKAGRAPTPEDFPRQLALMKELVDLLGLERLEVPGFEADDVLATLAKKAEREGYEVQILTADRDLFQLLSPRISVLHPEGHRITPEWLWEKYGLRPEQWVDFRALAGDPSDNIPGVKGIGEKTALKLLKEWGSLENLLKNLDQVKPESVREKILAHLEDLKLSRELSRVRTDLPLEVDFGRRREPDWEGLKAFLERLEFGSLLHEFGLLESPLLAEEAPWPPPEGAFLGYRLSRPEPMWAELLALAASAQGRVYRAEDPHGALRGLFEVRGLLAKDLAVVALREGLDLPPTDDPMLLAYLLDPSNTTPEGVARRYGGEWTEDAAKRALLAERLHENLLGRLQGEERLRWLYEEVEKPLSRVLAHMEATGVKLDVAYLENLSLEVAAHMRRLEEEVFRLAGRSFRLNSRDQLERVLFDELGLPPIGKTEKTGKRSTSAAVLEALREVHPIVDKILQYREMAKLKGTYIDRLPALVHPKTGRLHTRFNQTATATGRLSSSDPNLQNIPVRTPLGQKIRRAFVAEPGWALVALDYRQIELRVLAHLSGDENLIRVFQEGKDIHTQTASWMFGLSAEAIDPLMRRAAKTINFGVLYGMSAFRLSQELGIPYEEAQAFIQKYFQGYPKVKAWIEKTLREGRTRGYVETLFGRRRYVPDLNARVKGKREAAERMAFNMPVQGTAADLMKLAMVRLFPQLREVGARMLLQVHDELLLEAPKERAEEVAALAKEVMEGVWPLAVPLEVEVGIGEDWLAAKG

SEQ ID NO: 6639 - DNA, 2523 bp, synthetic construct
  misc_feature 1..2523: note = Variant of DNA polymerase I from Thermus sp. strain 2.9
  source 1..2523: mol_type = other DNA
atgcaccatcatcatcatcatggcggtagcggcgtgttaccggtgttcgagcctaaaggtcgcgtgcttctggttgatggccatcatctcgcgtatcgtaacttctttgccctgaaaggattaaccaccagcctgggcgagccggtacagggtgtctacggctttgcaaagtcgctcctgaaagctctgaaagaagacggtgatgtggtgattgttgtctttgatgcgaaagcgccaagttttcgccacgaagcgtacgaagcttacaaagccgggcgtgctccaacgccggaagactttcctcgccaattggcgcttatgaaggaattagtggatttgcttggcctcgaacgcttggaagttcccggtttcgaggcagacgacgtattagcgactctcgcaaagaaagccgaacgtgagggctatgaagtccagatcttgacagcagatcgcgatcttttccagcttttatctccgcgcatctcggtgttacacccggaagggcatcgtatcaccccggaatggctctgggagaaatatggtttgcgtcccgaacaatgggtggattttcgcgccttagcaggcgatccgagcgacaatattccgggagttaaaggtatcggcgagaagacggcgctcaagctccttaaagaatgggggtcgttggagaacttgcttaagaatttagatcaggtcaaaccagagtcagtgcgtgagaagattcttgctcacctcgaagacctcaaattaagccgcgaattgtcccgtgtacgcaccgatttgccgctcgaagttgatttcggtcgccgccgcgaacctgactgggagggtcttaaagcgtttttagagcgtcttgaatttggttcgctcttgcatgaattcggccttttagaaagcccgttactggccgaagaagcaccttggccaccgcccgagggcgcgtttttaggttaccgtttgagtcgcccggaaccgatgtgggccgaattactggctcttgcagcgtctgcccagggacgtgtgtatcgcgcggaagaccctcatggtgcgctccgcggcctcttcgaagtccgtggactccttgccaaagacttagctgttgttgcattgcgcgaaggtcttgatttacctccgactgatgatccaatgcttcttgcgtacctcttggacccgtcaaacacgacgcccgaaggcgtagcccgtcgttacggcggcgagtggaccgaagatgcagcgaaacgcgcgttattggccgaacgtttgcacgaaaatttattaggacgtttgcaaggcgaggaacgtctcctctggctttacgaagaagtggagaaaccattgagtcgcgtgctcgcgcatatggaagctaccggtgtcaaattagacgtggcgtatttggagaatctcagccttgaagttgctgcccacatgcgccgcttggaggaagaagtattccgtttagcaggccgttcctttcgccttaactctcgcgatcagttagaacgtgtgttgttcgatgaacttggtctccctcctatcggcaagacagagaagaccggtaaacgtagcacttcagcggcggttttagaagctcttcgcgaagtccatcccattgtggacaagatcttgcagtaccgcgaaatggcgaaattgaaaggcacctatattgaccgtcttccggcattagtccacccgaaaacgggacgcctccatacccgcttcaaccaaacagccacggcgaccggtcgtttgtcctcctctgatccaaaccttcagaatattccagtacgtacctttttgggccagaagatccgccgtgcgtttgtagctgaggagggttggcgtttagtggccctcgattatcgtcaaattgaattacgtgtccttgcccatctttctggcgatgagaacctcatccgcgtgtttcaggaaggcaaagacattcacactcaaacggcaagctggatgtttggattatcagctgaagcgatcgatcctttgatgcgtcgtgcagcgaagaccatcaatttcggtgttctctacggtatgagtgcctttcgtttgtcgcaggaattaggcattcccctggaagaagctcagggtttcattcagaaatactttcaaggctatcccaaagttaaagcatggatcgagaagactctccgtgaaggccgcacacgtggttacgtagagaccttatttggacgtcgccgctatgttcccgatttaaactcgcgcgtgaaaggcaagcgtgaagccgccgaacgcatggcgttcaacatgcctgtacagggcacggcagctgacctcatgaaacttgcaatggtgcgcctttttccacaattgcgtgaagttggtgcccgcatgctgttgcaggtccacgatgaactcttgttagaagcgccaaaagagcgtgcggaagaggtggcagccctcgcgaaagaagttatggaaggcgtgtggcccttagcggtgcctcttgaagtcgaagttggtattggcgaggattggctggctgccaaagga

SEQ ID NO: 6640 - protein, 841 aa, synthetic construct
  REGION 1..841: note = Variant of DNA polymerase I from Thermus sp. strain 2.9
MHHHHHHGGSGVLPVFEPKGRVLLVDGHHLAYRNFFALKGLTTSLGEPVQGVYGFAKSLLKALKEDGDVVIVVFDAKAPSFRHEAYEAYKAGRAPTPEDFPRQLALMKELVDLLGLERLEVPGFEADDVLATLAKKAEREGYEVQILTADRDLFQLLSPRISVLHPEGHRITPEWLWEKYGLRPEQWVDFRALAGDPSDNIPGVKGIGEKTALKLLKEWGSLENLLKNLDQVKPESVREKILAHLEDLKLSRELSRVRTDLPLEVDFGRRREPDWEGLKAFLERLEFGSLLHEFGLLESPLLAEEAPWPPPEGAFLGYRLSRPEPMWAELLALAASAQGRVYRAEDPHGALRGLFEVRGLLAKDLAVVALREGLDLPPTDDPMLLAYLLDPSNTTPEGVARRYGGEWTEDAAKRALLAERLHENLLGRLQGEERLLWLYEEVEKPLSRVLAHMEATGVKLDVAYLENLSLEVAAHMRRLEEEVFRLAGRSFRLNSRDQLERVLFDELGLPPIGKTEKTGKRSTSAAVLEALREVHPIVDKILQYREMAKLKGTYIDRLPALVHPKTGRLHTRFNQTATATGRLSSSDPNLQNIPVRTFLGQKIRRAFVAEEGWRLVALDYRQIELRVLAHLSGDENLIRVFQEGKDIHTQTASWMFGLSAEAIDPLMRRAAKTINFGVLYGMSAFRLSQELGIPLEEAQGFIQKYFQGYPKVKAWIEKTLREGRTRGYVETLFGRRRYVPDLNSRVKGKREAAERMAFNMPVQGTAADLMKLAMVRLFPQLREVGARMLLQVHDELLLEAPKERAEEVAALAKEVMEGVWPLAVPLEVEVGIGEDWLAAKG

SEQ ID NO: 6641 - DNA, 2523 bp, synthetic construct
  misc_feature 1..2523: note = Variant of DNA polymerase I from Thermus sp. strain 2.9
  source 1..2523: mol_type = other DNA
atgcaccatcatcatcatcatggcggtagcggcgtgttaccggtgttcgagcctaaaggtcgcgtgcttctggttgatggccatcatctcgcgtatcgtaacttctttgccctgaaaggattaaccaccagcctgggcgagccggtacagggtgtctacggctttgcaaagtcgctcctgaaagctctgaaagaagacggtgatgtggtgattgttgtctttgatgcgaaagcgccaagttttcgccacgaagcgtacgaagcttacaaagccgggcgtgctccaacgccggaagactttcctcgccaattggcgcttatgaaggaattagtggatttgcttggcctcgaacgcttggaagttcccggtttcgaggcagacgacgtattagcgactctcgcaaagaaagccgaacgtgagggctatgaagtccagatcttgacagcagatcgcgatcttttccagcttttatctccgcgcatctcggtgttacacccggaagggcatcgtatcaccccggaatggctctgggagaaatatggtttgcgtcccgaacaatgggtggattttcgcgccttagcaggcgatccgagcgacaatattccgggagttaaaggtatcggcgagaagacggcgctcaagctccttaaagaatgggggtcgttggagaacttgcttaagaatttagatcaggtcaaaccagagtcagtgcgtgagaagattcttgctcacctcgaagacctcaaattaagccgcgaattgtcccgtgtacgcaccgatttgccgctcgaagttgatttcggtcgccgccgcgaacctgactgggagggtcttaaagcgtttttagagcgtcttgaatttggttcgctcttgcatgaattcggccttttagaaagcccgttactggccgaagaagcaccttggccaccgcccgagggcgcgtttttaggttaccgtttgagtcgcccggaaccgatgtgggccgaattactggctcttgcagcgtctgcccagggacgtgtgtatcgcgcggaagaccctcatggtgcgctccgcggcctcttcgaagtccgtggcctccttgccaaagacttagctgttgttgcattgcgcgaaggtcttgatttacctccgactgatgatccaatgcttcttgcgtacctcttggacccgtcaaacacgacgcccgaaggcgtagcccgtcgttacggcggcgagtggaccgaagatgcagcgaaacgcgcgttattggccgaacgtttgcacgaaaatttattaggacgtttgcaaggcgaggagcgtctcctgtggctttacgaagaagtggagaaaccattgagtcgcgtgctcgcgcatatggaagctaccggtgtcaaattagacgtggcgtatttggagaatctcagccttgaagttgctgcccacatgcgccgcttggaggaagaagtattccgtttagcaggccgttcctttcgccttaactctcgcgatcagttagaacgtgtgttgttcgatgaacttggtctccctcctatcggcaagacagagaagaccggtaaacgtagcacttcagcggcggttttagaagctcttcgcgaagtccatcccattgtggacaagatcttgcagtaccgcgaaatggcgaaattgaaaggcacctatattgaccgtcttccggcattagtccacccgaaaacgggacgcctccatacccgcttcaaccaaacagccacggcgaccggtcgtttgtcctcctctgatccaaaccttcagaatattccagtacgtaccccattgggccagaagatccgccgtgcgtttgtagctgaggagggttgggcgttagtggccctcgattatcgtcaaattgaattacgtgtccttgcccatctttctggcgatgagaacctcatccgcgtgtttcaggaaggcaaagacattcacactcaaacggcaagctggatgtttggattatcagctgaagcgatcgatcctttgatgcgtcgtgcagcgaagaccatcaatttcggtgttctctacggtatgagtgcctttcgtttgtcgcaggaattaggcattcccctggaagaagctcaggctttcattcagaaatactttcaaagctatcccaaagttaaagcatggatcgagaagactctccgtgaaggccgcacacgtggttacgtagagaccttatttggacgtcgccgctatgttcccgatttaaacgctcgcgtgaaaggcaagcgtgaagccgccgaacgcatggcgttcaacatgcctgtacagggcacggcagctgacctcatgaaacttgcaatggtgcgcctttttccacaattgcgtgaagttggtgcccgcatgctcttgcaggtccacgatgaactcttgttagaagcgccaaaagagcgtgcggaagaggtggcagccctcgcgaaagaagttatggaaggcgtgtggcccttagcggtgcctcttgaagtcgaagttggtattggcgaggattggctggctgccaaagga

SEQ ID NO: 6642 - protein, 841 aa, synthetic construct
  REGION 1..841: note = Variant of DNA polymerase I from Thermus sp. strain 2.9
MHHHHHHGGSGVLPVFEPKGRVLLVDGHHLAYRNFFALKGLTTSLGEPVQGVYGFAKSLLKALKEDGDVVIVVFDAKAPSFRHEAYEAYKAGRAPTPEDFPRQLALMKELVDLLGLERLEVPGFEADDVLATLAKKAEREGYEVQILTADRDLFQLLSPRISVLHPEGHRITPEWLWEKYGLRPEQWVDFRALAGDPSDNIPGVKGIGEKTALKLLKEWGSLENLLKNLDQVKPESVREKILAHLEDLKLSRELSRVRTDLPLEVDFGRRREPDWEGLKAFLERLEFGSLLHEFGLLESPLLAEEAPWPPPEGAFLGYRLSRPEPMWAELLALAASAQGRVYRAEDPHGALRGLFEVRGLLAKDLAVVALREGLDLPPTDDPMLLAYLLDPSNTTPEGVARRYGGEWTEDAAKRALLAERLHENLLGRLQGEERLLWLYEEVEKPLSRVLAHMEATGVKLDVAYLENLSLEVAAHMRRLEEEVFRLAGRSFRLNSRDQLERVLFDELGLPPIGKTEKTGKRSTSAAVLEALREVHPIVDKILQYREMAKLKGTYIDRLPALVHPKTGRLHTRFNQTATATGRLSSSDPNLQNIPVRTPLGQKIRRAFVAEEGWALVALDYRQIELRVLAHLSGDENLIRVFQEGKDIHTQTASWMFGLSAEAIDPLMRRAAKTINFGVLYGMSAFRLSQELGIPLEEAQAFIQKYFQSYPKVKAWIEKTLREGRTRGYVETLFGRRRYVPDLNARVKGKREAAERMAFNMPVQGTAADLMKLAMVRLFPQLREVGARMLLQVHDELLLEAPKERAEEVAALAKEVMEGVWPLAVPLEVEVGIGEDWLAAKG

SEQ ID NO: 6643 - DNA, 2523 bp, synthetic construct
  misc_feature 1..2523: note = Variant of DNA polymerase I from Thermus sp. strain 2.9
  source 1..2523: mol_type = other DNA
atgcaccatcatcatcatcatggcggtagcggcgtgttaccggtgttcgagcctaaaggtcgcgtgcttctggttgatggccatcatctcgcgtatcgtaacttctttgccctgaaaggattaaccaccagcctgggcgagccggtacagggtgtctacggctttgcaaagtcgctcctgaaagctctgaaagaagacggtgatgtggtgattgttgtctttgatgcgaaagcgccaagttttcgccacgaagcgtacgaagcttacaaagccgggcgtgctccaacgccggaagactttcctcgccaattggcgcttatgaaggaattagtggatttgcttggcctcgaacgcttggaagttcccggtttcgaggcagacgacgtattagcgactctcgcaaagaaagccgaacgtgagggctatgaagtccagatcttgacagcagatcgcgatcttttccagcttttatctccgcgcatctcggtgttacacccggaagggcatcgtatcaccccggaatggctctgggagaaatatggtttgcgtcccgaacaatgggtggattttcgcgccttagcaggcgatccgagcgacaatattccgggagttaaaggtatcggcgagaagacggcgctcaagctccttaaagaatgggggtcgttggagaacttgcttaagaatttagatcaggtcaaaccagagtcagtgcgtgagaagattcttgctcacctcgaagacctcaaattaagccgcgaattgtcccgtgtacgcaccgatttgccgctcgaagttgatttcggtcgccgccgcgaacctgactgggagggtcttaaagcgtttttagagcgtcttgaatttggttcgctcttgcatgaattcggccttttagaaagcccgttactggccgaagaagcaccttggccaccgcccgagggcgcgtttttaggttaccgtttgagtcgcccggaaccgatgtgggccgaattactggctcttgcagcgtctgcccagggacgtgtgtatcgcgcggaagaccctcatggtgcgctccgcggcctcttcgaagtccgtggactccttgccaaagacttagctgttgttgcattgcgcgaaggtcttgatttacctccgactgatgatccaatgcttcttgcgtacctcttggacccgtcaaacacgacgcccgaaggcgtagcccgtcgttacggcggcgagtggaccgaagatgcagccaaacgcgcgttattggccgaacgtttgcacgaaaatttattaggacgtttgcaaggcgaggcgcgtctcctgtggctttacgaagaagtggagaaaccattgagtcgcgtgctcgcgcatatggaagctaccggtgtcaaattagacgtggcgtatttggagaatctcagccttgaagttgctgcccacatgcgccgcttggaggaagaagtattccgtttagcaggccgttcctttcgccttaactctcgcgatcagttagaacgtgtgttgttcgatgaacttggtctccctcctatcggcaagacagagaagaccggtaaacgtagcacttcagcggcggttttagaagctcttcgcgaagtccatcccattgtggacaagatcttgcagtaccgcgaaatggcgaaattgaaaggcacctatattgaccgtcttccggcattagtccacccgaaaacgggacgcctccatacccgcttcaaccaaacagccacggcgaccggtcgtttgtcctcctctgatccaaaccttcagaatattccagtacgtaccccattgggccagaagatccgccgtgcgtttgtagctgaggagggttggcgtttagtggccctcgattatcgtcaaattgaattacgtgtccttgcccatctttctggcgatgagaacctcatccgcgtgtttcaggaaggcaaagacattcacactcaaacggcaagctggatgtttggattatcagctgaagcgatcgatcctttgatgcgtcgtgcagcgaagaccatcaatttcggtgttctctacggtatgagtgcctttcgtttgtcgcaggaattaggcattccctatgaagaagctcagggtttcattcagaaatactttcaaagctatcccaaagttaaagcatggatcgagaagactctccgtgaaggccgcacacgtggttacgtagagaccttatttggacgtcgccgctatgttcccgatttaaactcgcgcgtgaaaggcaagcgtgaagccgccgaacgcatggcgttcaacatgcctgtacagggcacggcagctgacctcatgaaacttgcaatggtgcgcctttttccacaattgcgtgaagttggtgcccgcatgctgttgcaggtccacgatgaactcttgttagaagcgccaaaagagcgtgcggaagaggtggcagccctcgcgaaagaagttatggaaggcgtgtggcccttagcggtgcctcttgaagtcgaagttggtattggcgaggattggctggctgccaaagga

SEQ ID NO: 6644 - protein, 841 aa, synthetic construct
  REGION 1..841: note = Variant of DNA polymerase I from Thermus sp. strain 2.9
MHHHHHHGGSGVLPVFEPKGRVLLVDGHHLAYRNFFALKGLTTSLGEPVQGVYGFAKSLLKALKEDGDVVIVVFDAKAPSFRHEAYEAYKAGRAPTPEDFPRQLALMKELVDLLGLERLEVPGFEADDVLATLAKKAEREGYEVQILTADRDLFQLLSPRISVLHPEGHRITPEWLWEKYGLRPEQWVDFRALAGDPSDNIPGVKGIGEKTALKLLKEWGSLENLLKNLDQVKPESVREKILAHLEDLKLSRELSRVRTDLPLEVDFGRRREPDWEGLKAFLERLEFGSLLHEFGLLESPLLAEEAPWPPPEGAFLGYRLSRPEPMWAELLALAASAQGRVYRAEDPHGALRGLFEVRGLLAKDLAVVALREGLDLPPTDDPMLLAYLLDPSNTTPEGVARRYGGEWTEDAAKRALLAERLHENLLGRLQGEARLLWLYEEVEKPLSRVLAHMEATGVKLDVAYLENLSLEVAAHMRRLEEEVFRLAGRSFRLNSRDQLERVLFDELGLPPIGKTEKTGKRSTSAAVLEALREVHPIVDKILQYREMAKLKGTYIDRLPALVHPKTGRLHTRFNQTATATGRLSSSDPNLQNIPVRTPLGQKIRRAFVAEEGWRLVALDYRQIELRVLAHLSGDENLIRVFQEGKDIHTQTASWMFGLSAEAIDPLMRRAAKTINFGVLYGMSAFRLSQELGIPYEEAQGFIQKYFQSYPKVKAWIEKTLREGRTRGYVETLFGRRRYVPDLNSRVKGKREAAERMAFNMPVQGTAADLMKLAMVRLFPQLREVGARMLLQVHDELLLEAPKERAEEVAALAKEVMEGVWPLAVPLEVEVGIGEDWLAAKG

SEQ ID NO: 6645 - DNA, 2523 bp, synthetic construct
  misc_feature 1..2523: note = Variant of DNA polymerase I from Thermus sp. strain 2.9
  source 1..2523: mol_type = other DNA
atgcaccatcatcatcatcatggcggtagcggcgtgttaccggtgttcgagcctaaaggtcgcgtgcttctggttgatggccatcatctcgcgtatcgtaacttctttgccctgaaaggattaaccaccagcctgggcgagccggtacagggtgtctacggctttgcaaagtcgctcctgaaagctctgaaagaagacggtgatgtggtgattgttgtctttgatgcgaaagcgccaagttttcgccacgaagcgtacgaagcttacaaagccgggcgtgctccaacgccggaagactttcctcgccaattggcgcttatgaaggaattagtggatttgcttggcctcgaacgcttggaagttcccggtttcgaggcagacgacgtattagcgactctcgcaaagaaagccgaacgtgagggctatgaagtccagatcttgacagcagatcgcgatcttttccagcttttatctccgcgcatctcggtgttacacccggaagggcatcgtatcaccccggaatggctctgggagaaatatggtttgcgtcccgaacaatgggtggattttcgcgccttagcaggcgatccgagcgacaatattccgggagttaaaggtatcggcgagaagacggcgctcaagctccttaaagaatgggggtcgttggagaacttgcttaagaatttagatcaggtcaaaccagagtcagtgcgtgagaagattcttgctcacctcgaagacctcaaattaagccgcgaattgtcccgtgtacgcaccgatttgccgctcgaagttgatttcggtcgccgccgcgaacctgactgggagggtcttaaagcgtttttagagcgtcttgaatttggttcgctcttgcatgaattcggccttttagaaagcccgttactggccgaagaagcaccttggccaccgcccgagggcgcgtttttaggttaccgtttgagtcgcccggaaccgatgtgggccgaattactggctcttgcagcgtctgcccagggacgtgtgtatcgcgcggaagaccctcatggtgcgctccgcggcctcttcgaagtccgtggactccttgccaaagacttagctgttgttgcattgcgcgaaggtcttgatttacctccgactgatgatccaatgcttcttgcgtacctcttggacccgtcaaacacgacgcccgaaggcgtagcccgtcgttacggcggcgagtggaccgaagatgcagccaaacgcgcgttattggccgaacgtttgcacgaaaatttattaggacgtttgcaaggcgaggaacgtctccgttggctttacgaagaagtggagaaaccattgagtcgcgtgctcgcgcatatggaagctaccggtgtcaaattagacgtggcgtatttggagaatctcagccttgaagttgctgcccacatgcgccgcttggaggaagaagtattccgtttagcaggccgttcctttcgccttaactctcgcgatcagttagaacgtgtgttgttcgatgaacttggtctccctcctatcggcaagacagagaagaccggtaaacgtagcacttcagcggcggttttagaagctcttcgcgaagtccatcccattgtggacaagatcttgcagtaccgcgaaatggcgaaattgaaaggcacctatattgaccgtcttccggcattagtccacccgaaaacgggacgcctccatacccgcttcaaccaaacagccacggcgaccggtcgtttgtcctcctctgatccaaaccttcagaatattccagtacgtaccccattgggccagaagatccgccgtgcgtttgtagctgagccgggttggcgtttagtggccctcgattatcgtcaaattgaattacgtgtccttgcccatctttctggcgatgagaacctcatccgcgtgtttcaggaaggcaaagacattcacactcaaacggcaagctggatgtttggattatcagctgaagcgatcgatcctttgatgcgtcgtgcagcgaagaccatcaatttcggtgttctctacggtatgagtgcctttcgtttgtcgcaggaattaggcattcccctggaagaagctcagggtttcattcagaaatactttcaaagctatcccaaagttaaagcatggatcgagaagactctccgtgaaggccgcacacgtggttacgtagagaccttatttggacgtcgccgctatgttcccgatttaaactcgcgcgtgaaaggcaagcgtgaagccgccgaacgcatggcgttcaacatgcctgtacagggcacggcagctgacctcatgaaacttgcaatggtgcgcctttttccacaattgcgtgaagttggtgcccgcatgctgttgcaggtccacgatgaactcttgttagaagcgccaaaagagcgtgcggaagaggtggcagccctcgcgaaagaagttatggaaggcgtgtggcccttagcggtgcctcttgaagtcgaagttggtattggcgaggattggctggctgccaaagga

SEQ ID NO: 6646 - protein, 841 aa, synthetic construct
  REGION 1..841: note = Variant of DNA polymerase I from Thermus sp. strain 2.9
MHHHHHHGGSGVLPVFEPKGRVLLVDGHHLAYRNFFALKGLTTSLGEPVQGVYGFAKSLLKALKEDGDVVIVVFDAKAPSFRHEAYEAYKAGRAPTPEDFPRQLALMKELVDLLGLERLEVPGFEADDVLATLAKKAEREGYEVQILTADRDLFQLLSPRISVLHPEGHRITPEWLWEKYGLRPEQWVDFRALAGDPSDNIPGVKGIGEKTALKLLKEWGSLENLLKNLDQVKPESVREKILAHLEDLKLSRELSRVRTDLPLEVDFGRRREPDWEGLKAFLERLEFGSLLHEFGLLESPLLAEEAPWPPPEGAFLGYRLSRPEPMWAELLALAASAQGRVYRAEDPHGALRGLFEVRGLLAKDLAVVALREGLDLPPTDDPMLLAYLLDPSNTTPEGVARRYGGEWTEDAAKRALLAERLHENLLGRLQGEERLRWLYEEVEKPLSRVLAHMEATGVKLDVAYLENLSLEVAAHMRRLEEEVFRLAGRSFRLNSRDQLERVLFDELGLPPIGKTEKTGKRSTSAAVLEALREVHPIVDKILQYREMAKLKGTYIDRLPALVHPKTGRLHTRFNQTATATGRLSSSDPNLQNIPVRTPLGQKIRRAFVAEPGWRLVALDYRQIELRVLAHLSGDENLIRVFQEGKDIHTQTASWMFGLSAEAIDPLMRRAAKTINFGVLYGMSAFRLSQELGIPLEEAQGFIQKYFQSYPKVKAWIEKTLREGRTRGYVETLFGRRRYVPDLNSRVKGKREAAERMAFNMPVQGTAADLMKLAMVRLFPQLREVGARMLLQVHDELLLEAPKERAEEVAALAKEVMEGVWPLAVPLEVEVGIGEDWLAAKG
